United States Patent Application Publication US 2025/0314672 A1 - sequence listing, part 2

SEQ ID NO: 6925 - DNA, 490 bp, unidentified
  misc_feature 1..490: note = Ascusbbf_412755, encodes 16S rRNA
  source 1..490: mol_type = genomic DNA
agagtttgatcatggctcaggacgaacgctggcggcgtgcctaacacatgcaagtcgaacggggcgcagagacgaagaggcggtgcttgcaccaagacggaatccctgcgcttagtggcggacgggtgagtaacgcgtggacaacctagccccggcagggggacagcagctggaaacggctggtaataccccatatgcgcacagcggcgcatgccgaagtgcggaaagccgagacggccgggggtgggtccgcgtccgattagccagttggcggggtaacggcccaccaaggcgacgatcggtagccggcctgagagggcggacggccacattgggactgagacacggcccagactcctgcgggaggcagcagtgggggatattgcacaatgggggggaccctgatgcagcgacgccgcgtgggtgaaggagcgcctcggcgcgtaaagccctatcggcagggaagacagtgacggtacctgcggaagaa

SEQ ID NO: 6926 - DNA, 472 bp, unidentified
  misc_feature 1..472: note = Ascusbbf_239251, encodes 16S rRNA
  source 1..472: mol_type = genomic DNA
agagtttgatcctggctcaggataaacgttggcggcgtgcctaacgcatgcaagtcgcacgagagcttcggctctagtggcggacgggtgagtaacacgtaggaacctgcccggaagtgggggacaactctccgaaaggggagctaataccgcatacggtctacggaccaaagcttcggcgcttccggaggggcctgcggtggattagctagttggtggggtaaaggcctaccaaggcgacgatccatagctggtctgagaggatggtcagccacactgggactgagacacggcccagactcctacgggaggcagcagcgaggaattttgcacaatcgacgcaagtcggatgcagcaacgccgcgtgcgggaagaaggccctcgggttgtaaaccgcttttgtgggggaagaagatctgacggtaccccacgaataagtcacggctaactacgtgccagcagccgcggtaat

SEQ ID NO: 6927 - DNA, 470 bp, unidentified
  misc_feature 1..470: note = Ascusbbf_153609, encodes 16S rRNA
  source 1..470: mol_type = genomic DNA
agagtttgatcatggctcagagtgaacgctggcggcatgcttaacacatgcaagtcgcacgggcagcaatgtcagtggcggacgggtgagtaccgcgtaggaatgtgtccagaggtgggggacaaccttgggaaactgaggctaataccgcatatgagctgaggctcaaagcagcgatgcgcctttggagtagcctgcgtccgattagctagttggtggggtaaaggcctaccaaggcgacgatcggtagctggtctgagaggacgaccagccacactgggactgagacacggcccagactcctacgggaggcagcagtggggaatattggacaatgggcgcaagcctgatccagcaatgccgcgtgtgtgaagaaggtcttcggatcgtaaagcactttcgacggggacgatgatgacggtacccgtagaagaagccccggctaacttcgtgccagcagccgcggtaat

SEQ ID NO: 6928 - DNA, 490 bp, unidentified
  misc_feature 1..490: note = Ascusbbf_259650, encodes 16S rRNA
  source 1..490: mol_type = genomic DNA
agagtttgatcctggctcagaatgaacgttggcggcatggattaggcatgcaagtcgtacggtgagaattggttcgccttttctcatagtggcgaaagggatagtaacgcgtagacacctaccttctggacggggatagctgcgggaaactgcaggtaatacccgataatgacgagagtccaaaggtgtaattccttcagaagacggatctgcgtcctaccagatagttggcggggtaacggcccaccaagtctaagacgggtagcgggtgtgagagcatgacccgcatcactgggactgagacactgcccagacacctacgggtggctgcagtcgagaatcttcgtcaatgggcgaaagcctgaacgagcgatgccgcgtgcgggatggaggccttcgggttgtaaaccgctgtcgaattggaggaaatgcatagtgtagaattatgcttgactgatagtagaaggaaggacgggctaagttcgtgcca

SEQ ID NO: 6929 - DNA, 470 bp, unidentified
  misc_feature 1..470: note = Ascusbbf_157978, encodes 16S rRNA
  source 1..470: mol_type = genomic DNA
agagtttgatcctggctcagaacgaacgctggcggaatgcctaacacatgcaagtcgaacgaagtcttcggacttagtggcgcacgggtgagtaacgcgtgggaatctgccttggggtacggaataactcagggaaacttgagctaataccgtatgatgtcgtaagaccaaagatttatcgccctgagatgagcccgcgtcagattagctagttggtagggtaatggcctaccaaggcgacgatctgtagctggtctgagaggatgatcagccacactgggactgagacacggcccagactcctacgggaggcagcagtggggaatattggacaatgggcgaaagcctgatccagcaattccgcgtgagcgaagaaggccttcgggttgtaaagctctttcggcagggacgataatgacggtacctgcagaagaagccccggctaactccgtgccagcagccgcggtaat

SEQ ID NO: 6930 - DNA, 490 bp, unidentified
  misc_feature 1..490: note = Ascusbbf_1812699, encodes 16S rRNA
  source 1..490: mol_type = genomic DNA
agagtttgatcctggctcaggataaacgctagcggcaggcctaacacatgcaagtcgggcggtaacaggagtagcaatacttgctgacgagcggcagacgggtgagtaacgcgtatgcaaccttccccccgcacggggacagccttccgaaaggaggattgatacccgatagcctcatcaggcggcatcgcctgatgattaaagattcatcggcaggggatgggcatgcgtggcattagctagacggcggggtaacggcccaccgtggcgatgatgcctaggggttctaaaaggaaggtcccccacatcggtactgagacacggaccgaactcctacgggaggcagcagtgaggaatattggacaatggaggcaactctgatccagccaaaccgcgtgaaggatgaaggccctagtggtcgtaaacttcttttgcttggggataactgaaggtatgcataccatcttgaaggtaccaagcgaataagcac

SEQ ID NO: 6931 - DNA, 490 bp, unidentified
  misc_feature 1..490: note = Ascusbbf_418555, encodes 16S rRNA
  source 1..490: mol_type = genomic DNA
agagtttgatcctggctcaggatgaacgctggcggcgtgcctaacacatgcaagtcgaacgaagttagggaagagtttactttgaactaacttagtggcggacgggtgagtaacgcgtgagtaacctgcctttcagagggggacaacgtcttgaaaaggacgctaataccgcataatatattaagatggcatcgtcttaatatcaaaggagcaatccgctgaaagatggactcgcgtccgattagctggttggtgaggtaacggctcaccaaggcgacgatcggtagccggactgagaggttgaacggccacattgggactgagacacggcccagactcctacgggaggcagcagtgggggatattgcgcaatggggggaaccctgacgcagcaacgccgcgtgaaggaagacggttttcggattgtaaacttcttttgtaagggacgaagaatgacggtaccttacgaataagctccggctaactacgt

SEQ ID NO: 6932 - DNA, 490 bp, unidentified
  misc_feature 1..490: note = Ascusbbf_489728, encodes 16S rRNA
  source 1..490: mol_type = genomic DNA
agagtttgatcctggctcaggacgaacgctggcggcacgcttaacacatgcaagtcgaacggagttttaagagcttgcttttaaaacttagtggcggacgggtgagtaacacgtgagcaatctgcctttcagagggggatagcagttggaaacgactgataataccgcataacataaggacatcgcatggtgtccatatcaaagatttatcgctgaaagatgagctcgcgtctgattagatagttggtgaggtaacggcccaccaagtcgacgatcagtagccggactgagaggttgaacggccacattgggactgagacacggcccagactcctacgggaggcagcagtggggaatattgcacaatgggcgcaagcctgatgcagcgatgccgcgtgagggaagaaggttttaggattgtaaacctctgtcttatgggacgataatgacggtaccataggaggaagctccggctaactacgtgccagca

SEQ ID NO: 6933 - DNA, 490 bp, unidentified
  misc_feature 1..490: note = Ascusbbf_304891, encodes 16S rRNA
  source 1..490: mol_type = genomic DNA
agagtttgatcctggctcaggatgaacgctggcggcgtgcctaacacatgcaagtcgaacgattaagacgtcttcggacgtgtatagagtggcgaacgggtgagtaacacgtgaccaacctgccccttacttcgggataacgcaaggaaacctgcgctaataccgaatactccttttctgtcgcatgatggaatcgggaaagctcagacggtaagggatggggtcgcggcccattaggtagacggcggggtagaagcccaccgtgcctgcgatgggtagccgggttgagagaccgatcggccacattgggactgagatacggcccagactcctacgggaggcagcagtggggaattttgcgcaatgggggaaaccctgacgcagcaacgccgcgtgcgggatgacggccttcgggttgtaaaccgctttcagtagggaagatagtgacggtacctacagaagaagctccggctaactacgtgccagcagc

SEQ ID NO: 6934 - DNA, 490 bp, unidentified
  misc_feature 1..490: note = Ascusbbf_1763863, encodes 16S rRNA
  source 1..490: mol_type = genomic DNA
agagtttgatcctggctcagattgaacgctagcggaatgctttacacatgcaagtcgaacggcagcacggacttcggtctggtggcgagtggcgaacgggtgagtaatgcatcggaatgtacccagtagcgggggataactacgcgaaagcgtggctaataccgcatacgccctacgggggaaagggggggatccttcgggacctctcactattggagcagccgatgtcggattagctagttggtggggtaaaggcctaccaaggcaacgatccgtagctggtttgagaggacgaccagccacactgggactgagacacggcccagactcctacgggaggcagcagtggggaattttggacaatgggggaaaccctgatccagccattccgcgtgtgtgatgaaggccttcgggttgtaaagcacttttgtcaggaaagaaattgctcgggctaataccccgagtggatgacggtacctgaagaataagc

SEQ ID NO: 6935 - DNA, 490 bp, unidentified
  misc_feature 1..490: note = Ascusbbf_1431286, encodes 16S rRNA
  source 1..490: mol_type = genomic DNA
agagtttgatcatggctcaggacgaacgctggcggcgtgcctaacacatgcaagtcgaacggagttatgagagcggaagttttcggatggaagcgcttacaacttagtggcggacgggtgagtaacgcgtgagtaatctgcctctcagagggggacaacagttggaaacgactgctaataccgcataacggcatacctggcatcgggtgtgcataaaaggagaaatccgctgagagatgagctcgcgtccaattagctagttggtgagataacagcccaccaaggcgacgattggtagccggactgagaggtcgaacggccacattgggactgagacacggcccagactcctacgggaggcagcagtgggggatattgcgcaatgggggaaaccctgacgcagcaacgccgcgtgaaggaagaaggtcttcggattgtaaactttggtactcagaggagataatgacggtatctgaggttaagccacgac

SEQ ID NO: 6936 - DNA, 490 bp, unidentified
  misc_feature 1..490: note = Ascusbbf_466153, encodes 16S rRNA
  source 1..490: mol_type = genomic DNA
agagtttgatcatggctcaggatgaacgctggcggcgtgcctaacacatgcaagtcgaacggaactgattttgatgaatttcttcggagatgattcggttttagtttagtggcggacgggtgagtaacgcgtgagtaacctgccctcaagagggggataacgtcttgaaaaagacgctaataccgcataacattactttgtcgcatggcagagtaatcaaaactcaggtgcttgaggatggactcgcgtccgattagatagttggagaggtaacggctccccaagtcgacgatcggtagccggactgagaggttgaacggccacattgggactgagacacggcccagactcctacgggaggcagcagtgggggatattgcgcaatgggggaaaccctgacgcagcaacgccgcgtggatgaagacggttttcggattgtaaagtccttttctgggggacgaagaatgacggtacctcaggaataagctcc

SEQ ID NO: 6937 - DNA, 490 bp, unidentified
  misc_feature 1..490: note = Ascusbbf_1821078, encodes 16S rRNA
  source 1..490: mol_type = genomic DNA
agagtttgatcatggctcaggatgaacgctggcggcacgcttaacacatgcaagtcgaacggaacttgggagcttgctttcaagtttagtggcggacgggtgagtaacacgtgagcaacctgcctttcggcggggaataatgattggaaacgatcactaataccccataaaataggcttatcgcatgatagatttatcaaagattcatcaccgaaagatgggctcgcgtccgattaggcagttggtgaggtaacggctcaccaaaccgacgatcggtagccgtactgagaggtagaacggccacattgggactgagacacggcccagactcctacgggaggcagcagtggggaatattgcacaatggaggaaactctgatgcagcgatgccgcgtgagggaagaaggttttcggattgtaaacctctgtcttaagggacgaagaaagtgacggtaccttaggaggaagctccggctaactacgtgccagc

SEQ ID NO: 6938 - DNA, 158 bp, unidentified
  misc_feature 1..158: note = Ascusbbf_107095, encodes 16S rRNA
  source 1..158: mol_type = genomic DNA
agagtttgatcctggctcagcagccgcggtaatgccagcagccgcggtaatgccagcagccgcggtaatagagtttgatcatggctcagagagtttgatcatggctcagcagccgcggtaatgccagcagccgcggtaatgccagcagccgcggtaat

SEQ ID NO: 6939 - DNA, 490 bp, unidentified
  misc_feature 1..490: note = Ascusbbf_867378, encodes 16S rRNA
  source 1..490: mol_type = genomic DNA
agagtttgatcatggctcaggatgaacgctagcggcaggcctaatacatgcaagtcgaacgggatccaccagcttgctggtggtgagagtggcgcacgggtgcgtaacgcgtgagcaacctgcccgtcccagggggatagcccctcgaaagagggattaaaaccgcatgacgctggaggatggcatcatccaccagccaaatattcataggggacggatgggctcgcgtggcattagcttgttggtaaggtaacggcttaccaaggcaacgatgcctaggggctctgagaggagaatcccccacactggtactgagacacggaccagactcctacgggaggcagcagtaaggaatattggtcaatgggcgaaagcctgaaccagccatgccgcgtgcaggaagacggccctacgggttgtaaactgcttttgtcagggaacaaacccccgctcgtgagcggggctgagtgtacctgaagaataaggatcg

SEQ ID NO: 6940 - DNA, 490 bp, unidentified
  misc_feature 1..490: note = Ascusbbf_617514, encodes 16S rRNA
  source 1..490: mol_type = genomic DNA
agagtttgatcctggctcagattgaacgctggcggcaggcttaacacatgcaagtcgaacggtaacataaagaagcttgcttctttgatgacgagtggcggacgggtgagtaatgcttgggaatctagcttatggagggggataactatgggaaactgtagctaataccgcgtagaatcgggagatgaaagtgtgggaccttcgggccacatgccataggatgagcccaagtgggattaggtagttggtgaggtaaaggctcaccaagccgacgatctctagctggtctgagaggatgaccagccacactgggactgagacacggcccaggctcctacgggaggcagcagtggggaatattgcgcaatgggggcaaccctgacgcagccatgccgcgtgaatgaagaaggccttcgggttgtaaagttctttcggtagcgaggaaggcatttagtttaatagactaggtgattgacgttaactacagaag

SEQ ID NO: 6941 - DNA, 490 bp, unidentified
  misc_feature 1..490: note = Ascusbbf_992826, encodes 16S rRNA
  source 1..490: mol_type = genomic DNA
agagtttgatcctggctcaggatgaacgctggcggcgtgcctaatacatgcaagtcgaacggactgtagcaatacagttagtggcgaacgggtgagtaacacgtaggtaacctgccctcaagactgggatacccagacgaaagtttggctaataccggataacaactctggaggcatctccggagtttgaaaggcgcctttaaagcgccacttaaggatggacctgcggtgcattagctagttggtgagataacagcccaccaaggcgaggatgcatagccgatctgagaggatgaccggccacaatgggactgagacacggcccatactcctacgggaggcagcagtagggagttttcggcaatgggcgaaagcctgaccgagcaacgccgcgtgagtgatgaaggtcttcggatcgtaaagctctgttacgagggatgaacgatagcttcaggaaatggttgctatttgacagtacctcgccagaaag

SEQ ID NO: 6942 - DNA, 490 bp, unidentified
  misc_feature 1..490: note = Ascusbbf_1139124, encodes 16S rRNA
  source 1..490: mol_type = genomic DNA
agagtttgatcatggctcagattgaacgctggcggcaggcttaacacatgcaagtcgaacggtaacagattagtacttgtactaatgctgacgagtggcggacgggtgagtaatgcttgggaatctggcttatggagggggataacgacgggaaactgtcgctaataccgcgtaatgtctacggactaaaggatgggactttcgagccattcgccataagatgagcccaagtgggattaggtagttggtgaggtaaaggcttaccaagccgtcgatctctagctggtctgagaggatgaccagccaaaccgggactgagacacggcccggactcctacgggaggcagcagtggggaatattgcacaatggggggaaccctgatgcagccatgccgcgtgaatgaagaaggccttcgggttgtaaagttctttcggtgacgaggaaggcgggtattttaatagaatacctgattgacgttaatcacagaag

SEQ ID NO: 6943 - DNA, 490 bp, unidentified
  misc_feature 1..490: note = Ascusbbf_740113, encodes 16S rRNA
  source 1..490: mol_type = genomic DNA
agagtttgatcctggctcaggatgaacgctggcggcgtgcctaacacatgcaagtcgaacgggaactctgggatgaaggttcgctggattcctagaaattctagtggcggacgggtgagtaacgcgtgggtaacctgcccttaagaggcggataacattgagaaatcagtgctaatacgccatatgcttacggaatcgcatggttctgtgaggaaatgaatttcgcttaaggatggacccgcgtttgattagccagttggcagggtaacggcctaccaaagcgacgatcaatagccggcctgagagggtgaacggccacattggaactgagacacggtccaaactcctacgggaggcagcagtggggagtattgcacaatgggcgaaagcctgatgcagcaacgccgcgtgagtgaagaagtatttcggtatgtaaagctctatcgatggggaataaaatgaaggtacccaagtaagaagccccggctaa

SEQ ID NO: 6944 - DNA, 490 bp, unidentified
  misc_feature 1..490: note = Ascusbbf_941217, encodes 16S rRNA
  source 1..490: mol_type = genomic DNA
agagtttgatcctagctcagagttaacgctggcatcgtgcataacacatgcaagtcgaacgggacttgatttgtagcttgctatagattaagtttagtggcagacgggtgagtaatgtataaggaatctacctccgagtggggaataacagtccgaaaggattgctaataccccataacataatcagatggcatcatttgattatcaaagatttatcgcttggagatgatcttatattctatcagctagttggcagtgtaacggactaccaaggctacgacggatagccggcctgaaagggcgaccggccacaagggcactgagacacgggccctactcctacgggaggcagcagtggggaattttggacaatgggcgcaagcctgatccagcaacgatgcgtggaggatgaaggttttcggattgtaaactccttttgtgagggaagaaacaaatgacggtacctcacgaataagccacggctaactac

SEQ ID NO: 6945 - DNA, 490 bp, unidentified
  misc_feature 1..490: note = Ascusbbf_494186, encodes 16S rRNA
  source 1..490: mol_type = genomic DNA
agagtttgatcatggctcaggatgaacgctagctacaggcttaacacatgcaagtcgaggggcagcataggggtagcttgctacctttgatggcgaccggcggatgggtgagtaacgcgtatccaacctgccccgctcccggggacagcccttagaaatgaggattaacccccgatgttgtggcagtgccgcatggtgccgccacgaaatgtgaaggagcgggatggggatgcgttccattaggcagcaggcggggtaacggcccacctggccttcgatggataggggttctgagaggaaggtcccccacactggaactgagacacggtccagactcctacgggaggcagcagtgaggaatattggtcaatgggcgcgagcctgaaccagccaagtagcgtgcgggatgaaggccctacgggttgtaaaccgcttttgcgcgcggataaagagggtcacgtgtggcccgttgcaggtagcgcgcgaataa

SEQ ID NO: 6946 - DNA, 490 bp, unidentified
  misc_feature 1..490: note = Ascusbbf_742964, encodes 16S rRNA
  source 1..490: mol_type = genomic DNA
agagtttgatcatggctcaggacgaacgctggcggcgtgcttaacacatgcaagtcgaacgagggccatttgggagcttgctcttgggtggctcgagtggcggacgggtgagtaacgcgtgaggaacctgtcttacacagggggataacgcaccgaaaggcgtgctaataccgcataagacacggtaccgcatggtattgaggtcaaaggagcaatccggtgtaaggtggcctcgcgtcccattaggcagttggtgaggtaacggcccaccaaaccgacgatgggtagccgacctgagagggtgatcggccacattggaactgagacacggtccaaactcctacgggaggcagcagtggggaatattgggcaatgggcgcaagcctgacccagcaacgccgcgtgagggaagaaggttttcggattgtaaacctctgtcctcaatgaaaagcaggagatggtaattgaggaggaagccccggctaactac

SEQ ID NO: 6947 - DNA, 490 bp, unidentified
  misc_feature 1..490: note = Ascusbbf_1331026, encodes 16S rRNA
  source 1..490: mol_type = genomic DNA
agagtttgatcatggctcaggatgaacgctagcggcaggcttaacacatgcaagtcgaggggtaacgcgaggtagcaatactttggcgacgaccggcgcacgggtgcgtaacgcgtatgcaacctacctgtaacaggggtataacggggtgaaaatcccactaatcccccatattgttaaagaatcgcatgtttctttaacgaaagcttcggtggttacggatgggcatgcgtggcattagctagttggtaaggtaacggcttaccaaggcgacgatgtctaggggagctgagaggcttatcccccacactggtactgagacacggtccagactcctacgggaggcagcagtgaggaatattggacaatggaggcaactctgatccagccatgccgcgtgaaggacgaaggccctatgggtcgtaaacttcttttgtcagggagcaataagggccacgcgtggtccgacgagagtacctggcgaataagc

SEQ ID NO: 6948 - DNA, 490 bp, unidentified
  misc_feature 1..490: note = Ascusbbf_529679, encodes 16S rRNA
  source 1..490: mol_type = genomic DNA
agagtttgatcctggctcaggatgaacgctggcggcgcgcctaacacatgcaagtcgaacggcgaagtcccttcggggacggaacagtggcggacgggtgagtaacgcgtgagtaacctgcccttatgagcggaataacgtcgggaaactgacgctaataccgcataacgcacgggagtggcatcgctaccgtgccaaagatttatcgcataaggatggactcgcgtcccattagacagttggcggggtaacggcccaccaaatcagcgatgggtagccggactgagaggttgaacggccacattggaactgagagacggtccagactcctacgggaggcagcagtggggaatattgggcaatgggcgaaagcctgacccagcgacgccgcgtgagcgaagaaggtcttcggattgtaaagctctgtgtacagggacgataatgacggtacctgtatagaaagccacggctaactacgtgccagcagccg

SEQ ID NO: 6949 - DNA, 490 bp, unidentified
  misc_feature 1..490: note = Ascusbbf_1444779, encodes 16S rRNA
  source 1..490: mol_type = genomic DNA
agagtttgatcatggctcaggatgaacgctagcgggaggcttaacacatgcaagccgaggggtatagatagcttgctatctagagaccggcgcacgggtgcgtaacgcgtatgtaacttgccctattgagtgggatagcccttcgaaaggaggattaataccgcataacactaatacaggcatctgtattggttgaaagatttatcgcaataggatagacatgcgtcagattagctagttggtgaggtaacggctcaccaaggcgatgatctgtagggggcctgagagggtgaccccccacactggtactgagacacggaccagactcctacgggaggcagcagtgaggaatattggacaatgggtgagagcctgatccagccatcccgcgtgcaggaagacggccttatgggttgtaaactgcttttatataggaataaaccactttacgtgtagagtgttgaaggtactatatgaataagcaccggct

SEQ ID NO: 6950 - DNA, 490 bp, unidentified
  misc_feature 1..490: note = Ascusbbf_1737860, encodes 16S rRNA
  source 1..490: mol_type = genomic DNA
agagtttgatcatggctcaggacgaacgctggcggagtgcttaacacatgcaagtcgaacgaggatattcctttcgggggatattcgagtggcggacgggtgagtaacgcgtgaacaatctgtccttcaaagggggataccaactggaaacagttgctaataccgcataagaccacagtgtcgcatggcacagaggtaaaagacggaagtcgatggagggtgagttcgcgtctgattaggcagttggcggggtaaaggcccaccaaaccgacgatcagtagccgacctgagagggtgaccggccacattgggactgagacacggcccagactcctacgggaggcagcagtgggaatattgggcaatgggcgaaagcctgacccagcaacgccgcgtgagggaagaaggttttcggattgtaaacctctgtcctaaaggacgaaggaagtgacggtactttaggaggaagccccggctaactacgtgccag

SEQ ID NO: 6951 - DNA, 490 bp, unidentified
  misc_feature 1..490: note = Ascusbbf_727531, encodes 16S rRNA
  source 1..490: mol_type = genomic DNA
agagtttgatcctggctcaggatgaacgctggcggcgtgcctaacacatgcaagtcgaacggggttaagggaaattttcggatggaacttaacttagtggcggacgggtgagtaacgcgtggataacctgcctcacacagggggatagcagctggaaacggctggtaataccgcataagaccacaaagccgcatggctttgaggtaaaagatttatcggtgtgagatggatccgcgtctgattagccagttggcggggtaacggcccaccaaagcgacgatcggtagccgacctgagagggtgaacggccacattggaactgagagacggtccaaactcctacgggaggcagcagtggggaatattgggcaatgggcgaaagcctgacccagcaacgccgcgtgagtgaagaaggccttcgggttgtaaagctctgttatagttgacgaaggaagtgacggtaggctataagaaagccccggctaactac

SEQ ID NO: 6952 - DNA, 490 bp, unidentified
  misc_feature 1..490: note = Ascusbbf_726473, encodes 16S rRNA
  source 1..490: mol_type = genomic DNA
agagtttgatcatggctcaggatgaacgctggcggcgtgcctaacacatgcaagtcgagcgagaaatacttgattgaaacttcggtagatagatggtatggaaagcggcggacgggtgagtaacgcgtaggcaacctgccccttacacagggatagccattggaaacgatgattaaaacctgatgacaccaagagatgacatcttctcctggtcaaagatttatcggtaagggatgggcctgcgtctgattagatagttggtgaggtaacggcccaccaagtcaacgatcagtagccgacctgagagggtgatcggccacattggaactgagacacggtccaaactcctacgggaggcagcagtggggaatattgcacaatgggggaaaccctgatgcagcaacgccgcgtgaaggatgaaggtcttcggatcgtaaacttctgtcctagaggaagataatgacggtactcttggaggaagccccggcta

SEQ ID NO: 6953 - DNA, 490 bp, unidentified
  misc_feature 1..490: note = Ascusbbf_386138, encodes 16S rRNA
  source 1..490: mol_type = genomic DNA
agagtttgatcctggctcaggatgaacgctggcggcgtgcctaacacatgcaagtcgagcgggaaattccggaccgaagtttcggcagagggaaggaatggagagcggcggacgggtgagtaacacgtgggcaacctgccctgtacagagggatagccactggaaacggtgattaatacctcataatgctccaaggccacctggctttggggtcaaagatttatcggtacaggatgggcccgcgtctgattagctagttggtggggtaacggcctcccaaggcaacgatcagtagccgacctgagagggtaatcggccacattggaactgagacacggtccaaactcctacgggaggcagcagtggggaatattgcacaatgggggaaaccctgatgcagcaacgccgcgtgaatgatgaaggcctttgggtcgtaaaattctgttcttagggaagaaaaaaatgacggtacctaaggagaaagccccgg

SEQ ID NO: 6954 - DNA, 490 bp, unidentified
  misc_feature 1..490: note = Ascusbbf_714991, encodes 16S rRNA
  source 1..490: mol_type = genomic DNA
agagtttgatcatggctcaggatcaacgctggcggcgtgcctaatgcatgcaagtcgaacgtggtcccttcggggatgcgcgtggcggacgggtgaggaacacgtgggaaacctgccttttggtggggggtagccctcggaaacggggggtaattccgcatgagctcgcatcttggtgagaggtgtgaggaaaggctcttcggagtcgccgaaagagggtcctgcgcccgattagctagatggtggggtaacggcctaccatggcgatgatcggtagctggtctgagaggacggccagccacaggggaactgagacacggtccccactcctacgggaggcagcagcaaggaattttccgcaatgggcgaaagcctgacggagcaacgccgcgtgggggaagacacctttcggggcgtaaaccccttttctgtgggatgacaaccgacagtaccacaggaagaaggcccggctaactacgtgccagcagcc

SEQ ID NO: 6955 - DNA, 490 bp, unidentified
  misc_feature 1..490: note = Ascusbbf_1442999, encodes 16S rRNA
  source 1..490: mol_type = genomic DNA
agagtttgatcatggctcaggatgaatgctggcggcgtgcctaatacatgcaagtcgagcggtaacagggcttcaccgtttccttgacacacctagcgcttctatcgtaggttggttcgattcgagggaacagtgaagctgctgacgagcggcggacggctgagtaacgcgtgggaacgtaccccaaactgagggataacgcaccgaaaggtgtgctaataccgcatatgatcttcggattaaagcttacgggcggtttgggaatggcctgcgtacgattagatagttggtagggtaacggcctaccaagtcgacgatcgttagatggtttgagaagatgatcatccagactgggactgagacacggcccagactcctacgggaggcagcagtagggaatctttcacaatgggcgaaagcctgatggagcaacgccgcgtgcaggatgacggccttcgggttgtaaactgcttttatatctgagaaatat

SEQ ID NO: 6956 - DNA, 469 bp, unidentified
  misc_feature 1..469: note = Ascusbbf_1752787, encodes 16S rRNA
  source 1..469: mol_type = genomic DNA
agagtttgatcatgctcagaacgaacgctggcggcaggcctaacacatgcaagtcgaacgcactcttcggagtgagtggcagacgggtgagtaacacgtgggaacatgcccttcggttcggaataactcagggaaacctgtgctaataccggatacgtcctatgggagaaagatttatcgccgaaggattggcccgcgtctgattagctagttggtagggtaaaagcctaccaagacgatgatcagtagctggtctgagaggacgaccagccacactgggactgagacacggcccagactcctacgggaggcagcagtggggaatattggacaatgggcgaaagcctgatccagccatgccgcgtggatgatgaaggctcttgggttgtaaaatcctttcgctagggaagataatgacggtacctagtaaagaagctccggctaacttcgtgccagcagccgcggtaat

SEQ ID NO: 6957 - DNA, 490 bp, unidentified
  misc_feature 1..490: note = Ascusbbf_1807486, encodes 16S rRNA
  source 1..490: mol_type = genomic DNA
agagtttgatcctggctcaggatgaacgctggcggcgtgcctaacacatgcaagtcgaacgggactgcaataatatgaactcttcggagggaattgtttgtagtttagtggcggacgggtgagtaacgcgtgagtaacctgcccttgagagggggataacgttctgaaaaggacgctaataccgcataacattatgttatcgcatgataatataatcaaaactgaggtgctgaaggatggactcgcgtccgattagatagttggtgaggtaacggctcaccaagtcgacgatcggtagccggactgagaggttgaacggccacattgggactgagacacggcccagactcctacgggaggcagcagtgggggatattgcgcaatgggggaaaccctgacgcagcaacgccgcgtggatgaagacggttttcggattgtaaagtccttttcttggggacgaattctgacggtacccaaggaataagctccg

SEQ ID NO: 6958 - DNA, 488 bp, unidentified
  misc_feature 1..488: note = Ascusbbf_1445762, encodes 16S rRNA
  source 1..488: mol_type = genomic DNA
agagtttgatcctggctcagaacgaacgctggcggcaggcttaacacatgcaagttgagcgggattgattgatagcttgctattgatcatgagagcagcgcactggtgagtaacacgtgggaacataccttttggtgggggacaacagttggaaacgactgctaataccgcataagccctgagggggaaagattaattgccgagagattggcccgcggaagattaggtagtaggtggggtaacggcctacctagccgacgatctatagctggtctgagagaacggacagctacattggaactgcggcacggtccagataccaacgggagtcagcagggaggaatattgggcaatggagggaactctgacccagccatgccgcgggagggaagaaggttttcggagtgtaaagctctttcagacgggaagatgatgacggtaccgtaagaagaagcaccggctaacttcgtgccagcagccgcggtaat

SEQ ID NO: 6959 - DNA, 490 bp, unidentified
  misc_feature 1..490: note = Ascusbbf_710964, encodes 16S rRNA
  source 1..490: mol_type = genomic DNA
agagtttgatcatggctcaggacgaacgctggcggcgtgcttaacacatgcaagtcgaacgggcatagagaggagcttgcttcactctatgttagtggcggacgggtgagtaacgcgtgagcaacttaccttggacagtggaataacacagggaaacttgtgctaataccgcatgaagtgcgggaagggcatcctttctgtaccaaaggagcaatccggtctgagatgggctcgcgtccgattagatagttggtgaggtaacggcccaccaagtctgcgatcggtagccggactgagaggttggccggccacattgggactgagacacggcccagactcctacgggaggcagcagtggggaatattaggcaatggggggaaccctgacctagcaacgccgcgtgaaggatgaaggttttcggattgtaaacttctttggcaggggacgataatgacggtaccctgagaacaagccacggctaactacgtg

SEQ ID NO: 6960 - DNA, 490 bp, unidentified
  misc_feature 1..490: note = Ascusbbf_1854682, encodes 16S rRNA
  source 1..490: mol_type = genomic DNA
agagtttgatcatggctcaggatgaacgctggcggcgtgcttaacacatgcaagtcgaacggagcttattaagaaagcggagcttgctccaatggatttttaagcttagtggcggacgggtgagtaacgcgtgggtaacctgccttgcacagggggacaacagttggaaacgactgctaataccgcataagccggtagcctcgcatgaggtatccggaaaagatttatcggtgcaagatgggcccgcgttggattagttagttggcggggtaaaggcccaccaagaccgcgatccatagccgacctgagagggtgatcggccacattgggactgagacacggcccaaactcctacgggaggcagcagtggggaatattgcgcaatgggggaaaccctgacgcagcaacgccgcgtgagtgaagaagtatttcggtatgtaaagctctatcagcagggaagaagatgacggtacctgcagaagaagtcccg

SEQ ID NO: 6961 - DNA, 490 bp, unidentified
  misc_feature 1..490: note = Ascusbbf_710448, encodes 16S rRNA
  source 1..490: mol_type = genomic DNA
agagtttgatcatggctcaggacgaacgctggcggtgtgcctcacacatgcaagtcgagcggatgtttattagaagcttgcttttgataaacgttagcggcggacgggtgagtaatacgtaggaatctgcctcaaggagggggacaacgggtcgaaagatccgctaataccccatatgcgagcaatcgtgaaaggagtaatccacctagagatgagcctgcgtccgattagctagttggcggggtaaaagcccaccaaggcaacgatcggtagttggtctgagaggatgatcagccacaatgggactgagacacggcccatactcctacgggaggcagcagtggggaattttacgcaatgggggaaaccctgacgtagcgacaccgcgtgagcgaagaagccttttggggtgtaaagctctgtcagctggaacgaacacaatgacggtaccagcagaggaagcatcggctaactacgtgccagcagccgc

SEQ ID NO: 6962 - DNA, 490 bp, unidentified
  misc_feature 1..490: note = Ascusbbf_1395671, encodes 16S rRNA
  source 1..490: mol_type = genomic DNA
agagtttgatcctggctcaggatgaacgctggcggcgtgcctaatacatgcgagtcgaacgagagtagcaatactcgagtggcgaacgggtgagtaacacgtagggaacctgcccttcagcttgggatacccgagggaaaccttggctaataccggataactgatttggaggcatctccagatcctaaaaggggcctttaaagcctcactgaaggatggacctgcggcgcattagctagttggtgagataatagcccaccaaggcgaggatgcgtagccgacctgagagggtgaacggccacactggaactgagacacggtccagactcctacgggaggcagcagtagggagttttcggcaatgggggaaaccctgaccgagcaacgccgcgtgagtgatgaaggtcttcggattgtaaaactctgttgtaggggaagaatgatactttgaggaaatgctaagtatttgacggtaccttattagaaagcc

SEQ ID NO: 6963 - DNA, 490 bp, unidentified
  misc_feature 1..490: note = Ascusbbf_718264, encodes 16S rRNA
  source 1..490: mol_type = genomic DNA
agagtttgatcatggctcaggataaacgctagcggcaggcctaacacatgcaagtcgagcggtaacacggtgtagcaatatattggtgacgagcggcggacgggtgagtaacgcgtatgcaacctaccctttacacagggatagctttccgaaaggagaattaatacctgatagtactagaaacgggcatccgagaagagttaaagattaattggtaaaggatgggcatgcgtagcattagttagttggtgaggtaacggctcaccaagacgatgatgcttaggggttctaaaaggaagatcccccacatcggtactgagacacggaccgaactcctacgggaggcagcagtgaggaatattggacaatgggcgagagcctgatccagccaaaccgcgtgaaggaagaaggttcttagaatcgtaaacttcttttgagagagaataatagtaagtatgtatacttatttgaatgtatcttttgaataagc

SEQ ID NO: 6964 - DNA, 490 bp, unidentified
  misc_feature 1..490: note = Ascusbbf_1807344, encodes 16S rRNA
  source 1..490: mol_type = genomic DNA
agagtttgatcatggctcaggacgaacgctggcggcgtgcttaacacatgcaagtcgaacgaagcttgatttatgatttcttcggaatgaataatgatatgacttagtggcggacgggtgagtaacgcgtgaggaacctgcctttcagagggggacaacatttggaaacgaatgctaataccgcataacgcattttaaggacatcctttaaatgccaaagatttatcgctgaaagatggcctcgcgtccaattagttagttggcggggtaacggcccaccaagacgacgattggtagccggactgagaggttgaacggccacattgggactgagacacggcccagactcctacgggaggcagcagtggggaatattgcacaatgggcgcaagcctgatgcagcaacgccgcgtgaaggaagacggttttcggattgtaaacttctgttcttagtgacgaaacaaatgacggtagctaaggagcaagccac

SEQ ID NO: 6965 - DNA, 490 bp, unidentified
  misc_feature 1..490: note = Ascusbbf_473260, encodes 16S rRNA
  source 1..490: mol_type = genomic DNA
agagtttgatcatggctcaggatgaacgctggcggcgtgcataacacattcaagtcgaacggacgaagccccttcgggggctgagttagtggcggacgggtgagtaacgcgtgagcaacctgcctatgcgagggggataacagtgggaaactactgctaataccgcataaaacgtggtgaaggcatcttcggcacgtcaaagatatattgcgcatagatgggctcgcgtccgattagatagttggtgaggtaacggcccaccaagtcgacgatcggtagccggactgagaggttgaacggccacattggaactgagagacggtccagactcctacgggaggcagcagtggggaatattgggcaatgggcgaaagcctgacccagcgacgccgcgtgagtgaagaaggtcttcggattgtaaagcttagttatcggggaagaaggaagtgacggtacccgaagagaaagccacggctaactacgtgccagc

SEQ ID NO: 6966 - DNA, 490 bp, unidentified
  misc_feature 1..490: note = Ascusbbf_1804337, encodes 16S rRNA
  source 1..490: mol_type = genomic DNA
agagtttgatcctggctcagattgaacgctggcggcatgccttacacatgcaagtcggacggtaacgcgggcttcggcctggcgacgagtggcgaacgggtgagtaatatatcggaacgtgcccttgagtgggggataactagtcgaaagattagctaataccgcatacgatctacggatgaaagtgggggaccgcaaggcctcacgctcgtggagcggccgatatctgattagctagttggtggggtaaaggcctaccaaggcgacgatcagtagctggtctgagagggcgatcagccacactgggactgagacacggcccagactcctacgggaggcagcagtggggaattttggacaatgggggcaaccctgatccagcaatgccgcgtgtgtgaagaaggccttcgggttgtaaagcacttttgtccggaaagaaatcgttctggctaatacctggagcggatgacggtaccggaagaataagcac

SEQ ID NO: 6967 - DNA, 490 bp, unidentified
  misc_feature 1..490: note = Ascusbbf_942134, encodes 16S rRNA
  source 1..490: mol_type = genomic DNA
agagtttgatcatggctcaggacgaacgctggcggcgtgcttaacacatgcaagtcgagcgaggccctccttcggggggtgccctagcggcgaacgggtgagtaacacgtgggcaacctgccctcagctctgggataactccaagaaattggtgctaataccggatgtgaccgctgaccgcatggtctggtggtggaaagattcatcggctgaggatgggcccgcggcctatcagcttgttggtggggtaatggcctaccaaggcgacgacgggtagccggcctgagagggtgaccggccacactgggactgagacacggcccagactcctacgggaggcagcagtggggaatattgcgcaatgggcgaaagcctgacgcagcgacgccgcgtgagggatgacggccttcgggttgtaaacctctttcagtagggacgaagcgcaagtgacggtacctacagaagaagcaccggccaactacgtgccagc

SEQ ID NO: 6968 - DNA, 490 bp, unidentified
  misc_feature 1..490: note = Ascusbbf_1865983, encodes 16S rRNA
  source 1..490: mol_type = genomic DNA
agagtttgatcatgctcaggatgaacgctggcggcgtgcctaacacatgcaagtcgggcgggaatcatcggattgaaacttcggtcgaaagacggtgaggatagcggcggacgggtgagtaacgcgtaggtaacctgccccttacacagggatagcctcgggaaactgggattaatacctgataacgcgaaggagccacatggcttcatcgccaaagatttatcggtgagggatggacctgcgtctgattagctagttggtgaggtaacggcccaccaaggcaacgatcagtagccgacctgagagggtaatcggccacattggaactgagacacggtccaaactcctacgggaggcagcagtggggaatattgcacaatgggcgcaagcctgatgcagcaacgccgcgtgagcgaagaaggtcttcggatcgtaaagctctgtcctcaggaacgaagaagtgacggtacctgaggaggaagccccggct

SEQ ID NO: 6969 - DNA, 490 bp, unidentified
  misc_feature 1..490: note = Ascusbbf_1746791, encodes 16S rRNA
  source 1..490: mol_type = genomic DNA
agagtttgatcctggctcaggatgaacgctagcggcaggcctaacacatgcaagtcgaacggtaacaggaattagcttgctaatttgctgacgagtggcgcacgggtgcgtaacgcgtatgcaacttacctctaacaggaggatagcctttcgaaaggaagaataatactccataatatttatttgtggcatcacagatttattaaaactacggtggttagagataggcatgcgtcctattagctagttggtgaggtaacagctcaccaaggcgatgataggtagggggcctgagagggttatcccccacactggtactgagacacggaccagactcctacgggaggcagcagtgaggaatattggtcaatggacgaaagtctgaaccagccatgccgcgtgcaggaagactgccctacgggttgtaaactgcttttatataggaataaaccctcgttcgtgaacgaggctgaaggtactataagaataa

SEQ ID NO: 6970 - DNA, 490 bp, unidentified
  misc_feature 1..490: note = Ascusbbf_1881501, encodes 16S rRNA
  source 1..490: mol_type = genomic DNA
agagtttgatcatggctcaggatgaacgctggcggcgtgcctaacacattcaagtcgaacggaccttagagggcttgctctttaaggttagtggcggacgggtgagtaacgcgtgagcaacctgcctctgacagcgggataacattgggaaaccggtgctaataccgcatgacacaccgagtttgcatggacacggtgtcaaagaagcaattcggtcagagatgggctcgcgtctgattagttagttggcggggtaacggcccaccaagacgacgatcagtagccggactgagaggtcgaacggccacattggaactgagaaacggtccagactcctacgggaggcagcagtggggaatattgggcaatgggcgaaagcctgacccagcgacgccgcgtggaggaagaaggtcttcggattgtaaactcctgtcaacagggaagaagcaagtgacggtacctgtagaggaagccacggctaactacgtgc

SEQ ID NO: 6971 - DNA, 490 bp, unidentified
  misc_feature 1..490: note = Ascusbbf_1818978, encodes 16S rRNA
  source 1..490: mol_type = genomic DNA
agagtttgatcatggctcaggatgaacgctagcggcaggcctaatacatgcaagtcgaggggcagcacaggtagcaatactgggtggcgaccggcaaacgggtgcggaacacgtacgcaaccttccttcaagcggggaatagcccagagaaatttggattaataccccataggaatgtagtctcgcatgagacagcatttaaagatttatcacttgaagatgggcgtgcgtctgattaggtagttggtgaggtaacggctcaccaagccgacgatcagtaactggcgtgagagcgcgaccagtcacacgggcactgagacacgggcccgactcctacgggaggcagcagtaaggaatattggtcaatggacgcaagtctgaaccagccatgccgcgtggaggatgaatgccctctgggttgtaaacttcttttatctgggacgaaacacttcttatctaaggagcttgacggtaccagatgaataagcac

SEQ ID NO: 6972 - DNA, 490 bp, unidentified
  misc_feature 1..490: note = Ascusbbf_1827667, encodes 16S rRNA
  source 1..490: mol_type = genomic DNA
agagtttgatcctggctcaggataaacgctggcggcatgcctaatacatgcaagtcaaacgggtgtacttgtacaccagtggcgaacgggtgagtaatatgtaggtaacttgccctcaagacgaggataacagttggaaacgactgataatactggatagtaaacgaaaccgcatgattttgtttttaaagttcccccaaaggaacacttgaggagaggcctatatcgcattagctagttggtgaggtaacggcccaccaaggcgacgatgcgtaactgtgctgagaggcaaaacagtcacattggaacttagacacggtccaaactcctacgggaggcagcagtagggaattttcggcaatgggggaaaccctgaccgagcaatgccgcgtgaatgatgaagatcttcggattgtaaaattctgttgttaggaatgaattacattactaggaaatgagtagtgcttgacagtacctgactagaaagccc

SEQ ID NO: 6973 - DNA, 490 bp, unidentified
  misc_feature 1..490: note = Ascusbbf_1477389, encodes 16S rRNA
  source 1..490: mol_type = genomic DNA
agagtttgatcctggctcagattgaacgctggcggcaggcctaacacatgcaagtcgagcggaaacgatgggagcttgctcccaggcgtcgagcggcggacgggtgagtaacgcgtaggaatctacccaatagtgggggatagctcgaggaaactcgaattaataccgcatacgccctacgggggaaaggccgggatcttcggaccggttgctattggaagagcctgcgttggattagctagttggtaaggtaaaagcttaccaaggcgacgatccatagctggtctgagaggatgatcagccacactgggactgagacacggcccagactcctacgggaggcagcagtggggaatattggacaatgggggcaaccctgatccagccatgccgcgtgtgtgaagaaggctttcgggttgtaaagcactttaagcgaggaggaaggctttgtggttaatagccacaaggattgacgttactcgcagaataa

SEQ ID NO: 6974 - DNA, 490 bp, unidentified
  misc_feature 1..490: note = Ascusbbf_1785101, encodes 16S rRNA
  source 1..490: mol_type = genomic DNA
agagtttgatcatggctcaggatgaacgctagcggcaggcctaacacatgcaagtcgaggggtagaaaagagcttgctctttttgagaccggcaaacgggtgcggaacacgtacgcaatctgcccttatcacgggaatagcccagagaaatttggattaatgcccgatggtataatagagaggcatctctttattattaaagaatttcggataaggatgagcgtgcgcaagattagctagttggtagggtaacggcctaccaaggcgacgatctttagctgatgtgagagcatgatcagccacacgggcactgagacacgggcccgactcctacgggaggcagcagtgaggaatattggtcaatgggcggaagtctgaaccagccatgccgcgtgaaggatgaaggcgttctgcgttgtaaacttcttttattaggggagaaaccacttttgtctaagagtgttgacggtacctaatgaataagcaccgg

SEQ ID NO: 6975 - DNA, 490 bp, unidentified
  misc_feature 1..490: note = Ascusbbf_969117, encodes 16S rRNA
  source 1..490: mol_type = genomic DNA
agagtttgatcctggctcagaacgaacgctggcagcgtggattaggcatgcaagtcgaacgggattgtctggatagcaatattcgggcatgagagtggcggattggggaggaacacgtgagcaacctgccctggagatggggaaaacctctggaaacggaggctaataccgaatgtggcgccggacggcatcgtccgagcgccgaagggggccgcaaggctcccgctccgggatgggctcgcgcaccatcagctagttggcggggtaacggcccaccaaggcctacggttagctggtctgagaggatgaccagccccactgggactgagatactgcccagactcctacgggaggctgcagtcgaggatcattcgcaatggacgcaagtctgacgatgcgacgctgcgtggaggatgaaggccttcgggttgtaaactcctgtcatgagggaagaggcgaggggacccaatacgtcccttagttgactgta

SEQ ID NO: 6976 - DNA, 490 bp, unidentified
  misc_feature 1..490: note = Ascusbbf_399408, encodes 16S rRNA
  source 1..490: mol_type = genomic DNA
agagtttgatcctggctcaggacgaacgctggcggcgtgcctaacacatgcaagtcgagcgaagtttttatctttgatcccttcggggtgacgagataattatcttagcggcggacgggtgagtaacgcgtgagaaacctgccttttacaaagggatagcctctggaaacggggattaataccttatgatactttttttactcatgtagaaaaagtcaaagcgctttagcggtaaaagatggtctcgcgtcccattagctagttggtgagataaaagctcaccaaggcgacgatgggtagccggcctgagagggtgaacggccacactggaactgagacacggtccagactcctacgggaggcagcagtggggaatattgcacaatggaggaaactctgatgcagcgacgccgcgtgaacgatgaaggctttcgggtcgtaaagttctgtccttggggaagataatgacggtacccaaggaggaagcccc

SEQ ID NO: 6977 - DNA, 490 bp, unidentified
  misc_feature 1..490: note = Ascusbbf_1814069, encodes 16S rRNA
  source 1..490: mol_type = genomic DNA
agagtttgatcctggctcaggatgaacgctggcggcgtgcataacacattcaagtcgaacggactgatttggtagcttgctaccgatgaaagttagtggcggacgggtgagtaacgcgtgagcaacctgcctctgtgtgtgggataccgtctggaaacggacgttaataccgcataatccatagggaccgcatgattcttatggcaaagatttattgcacagagatgggctcgcgtctgattaggcagttggtgaggtaacggcccaccaaaccgacgatcggtagccggactgagaagttgaacggccacattggaactgagatacggtccagactcctacgggaggcagcagtggggaatattgggcaatgggcgaaagcctgacccagcgacgccgcgtgaaggaagacggccctcggattgtaaacttcttttatgtgggacgatacaagacggtaccacatgaataagccacggctaactacgtg

SEQ ID NO: 6978 - DNA, 490 bp, unidentified
  misc_feature 1..490: note = Ascusbbf_1504271, encodes 16S rRNA
  source 1..490: mol_type = genomic DNA
agagtttgatcctggctcaggacgaacgctggcggcgcgcctaacacatgcaagtcgagcggagatagtacttcggttctatcttagcggcggacgggtgagtaacgcgtgagcaacctgcccttgagcgggggatagcgtctggaaacggacggtaataccgcataatgtacgttggaggcatctccgatgtaccaaaggaggaatccactcaaggatgggctcgcgtccgattaggtagttggtgaggtaacggcccaccaagcctgcgatcggtagccggactgagaggttgtacggccacattgggactgagacacggcccagactcctacgggaggcagcagtgggggatattgcacaatggaggaaactctgatgcagcgacgccgcgtgagggaagaaggtcttcggattgtaaacctctgtctttcgggacgaaggaagtgacggtaccgaaagaggaagccacggctaactacgtgccagc

SEQ ID NO: 6979 - DNA, 490 bp, unidentified
  misc_feature 1..490: note = Ascusbbf_1809766, encodes 16S rRNA
  source 1..490: mol_type = genomic DNA
agagtttgatcatggctcagattgaacgctggcggcatgccttacacatgcaagtcgaacggtaacagggagcttgctccgctgacgagtggcgaacgggtgagtaaagcatcggaacgtaccattgagtgggggataacgtagcgaaagttacgctaataccgcatattctctccggaggaaagcaggggatcgcaagaccttgtgctctttgagcggccgatgtcagattagctagttggtggggtaaaggcctaccaaggcgacgatctgtagcgggtctgagaggatgatccgccacactgggactgagacacggcccagactcctacgggaggcagcagtggggaattttggacaatgggggcaaccctgatccagccatgccgcgtgagtgaagaaggccttcgggttgtaaagctctttcggccgggaagaaatcgcaaaggctaatatcctttgtggatgacggtaccggaataagaagcac

SEQ ID NO: 6980 - DNA, 490 bp, unidentified
  misc_feature 1..490: note = Ascusbbf_974765, encodes 16S rRNA
  source 1..490: mol_type = genomic DNA
agagtttgatcctggctcaggatgaacgctagcggcaggcttaatacatgcaagtcgaggggcagcaggggtgtagcaatacacctgctggcgaccggcaaacgggtgcggaacacgtacgcaacttaccctgaactggggcatagcccggggaaacccggattaataccccgtaacactattgggtggcatcacttgatagttaaagctttattgtggttcgggatgggcgtgcggctgattaggtagttggtaggggtaacggcccaccaagccgacgatcagtaactggtgtgagagcacgaccagtcacacgggcactgagacacgggcccgactcctacgggaggcagcagtaaggaatattgggcaatggaggcaactctgacccagccatgccgcgtggaggatgaaggccctctgggttgtaaacttcttttacctgggacgaaaccttctttttctaagggagttgacggtaccaggggaa

SEQ ID NO: 6981 - DNA, 487 bp, unidentified
  misc_feature 1..487: note = Ascusbbf_1888437, encodes 16S rRNA
  source 1..487: mol_type = genomic DNA
agagtttgatcctggctcagaacgaacgctggcggcaggtcttaggcatgcaagtcgaacgagtgaagcagggcttgccctgtggagcgagtggcgcacgagtgagtaacgcgtgggaaactgcccaccactggggaataacgtttggaaacgaacgctaataccgcatacgccggaaacgggaaagatttatcggtggtggatgtgcccgcgttggattagcttgttggtggggtaatggcccaccaaggcgatgatccatagctggtctgagaggctggccggccacattgggactgagatacggcccagactcctacgggaggcagcagttgggaatattggacaatggaggaaactctgatccagtgacgccgcgtgaaggaagaaggtcttcggattgtaaacttattttatcagggaagaagaaagtgacagtacctgaagaaaaaggaccggcaaactacgtgccagcagccgcggtaat

SEQ ID NO: 6982 - DNA, 490 bp, unidentified
  misc_feature 1..490: note = Ascusbbf_1862725, encodes 16S rRNA
  source 1..490: mol_type = genomic DNA
agagtttgatcatggctcaggacgaacgctggcggcgtgcctaacacacgcaagtcgaacggagttatttgaagcttgctttagataacttagtggcggacgggtgagtaacgcgtgagtaacctgcctttcagagggggataacgttctgaaaagaacgctaataccgcataacatatttaagccgcatggtttgaatatcaaaggagtaatccactgaaagatggactcgcgtccgattagctagttggtggggtaaaggcctaccaaggcgacgatcggtagccggactgagaggttgaacggccacattgggactgagacacggcccagactcctacgggaggcagcagtgggggatattgcacaatggaggaaactctgatgcagcaacgccgcgtgagggaagacggttttcggattgtaaacctctgtccttagggaagataatgacggtacctaaggaggaagctccggctaactacgtgcc

SEQ ID NO: 6983 - DNA, 490 bp, unidentified
  misc_feature 1..490: note = Ascusbbf_992605, encodes 16S rRNA
  source 1..490: mol_type = genomic DNA
agagtttgatcatggctcaggatgaacgctggcggcgtgcttaacacatgcaagtcgaacggagagaaagtgcttgcactttctcttagtggcggacgggtgagtaacgcgtgggtaacctgccctatgcagggggataacgtttggaaacgaacgctaataccgcataatctatgagagtcgcatgacactcatagcaaagatttatcagcataggatggacccgcgttggattagctagttggtgagataatagcccaccaaggcgacgatccatagccggcctgagagggtgaacggccacactgggactgagacacggcccagactcctacgggaggcagcagtggggaatattgcacaatgggcgaaagcctgatgcagcgacgccgcgtgaaggatgaaggtcttcggattgtaaacttctatcagcagggaagaaggagagtattcggactctcttgacggtacctgactaagaagccccggc

SEQ ID NO: 6984 - DNA, 486 bp, unidentified
  misc_feature 1..486: note = Ascusbbf_1746281, encodes 16S rRNA
  source 1..486: mol_type = genomic DNA
agagtttgatcctggctcagagtgaacgctggcggcgtgcttaacacatgcaagtcgaacgagtaagtgctgtagcaatacagattactgctagtggcagacgggtgagtaatacatgggaatctacctcgaagtctgggataactgttggaaacgatagctaataccggatattgccgagaggtgaaagtttttcgcttcgagatgagcccatgcaagattagctagttggtagggtaaaggcctaccaaggcgatgatctttagctggtctaagaggatgatcagccacactggaactgagacacggtccagactcctacgggaggcagcagtggggaatattggacaatgggcgaaagcctgatccagcgacgccgcgtgagtgatgaaggccttcgggttgtaaagctctttcagtagggaagataatgacggtacctacagaagaagctccggctaacttcgtgccagcagccgcggtaat

SEQ ID NO: 6985 - DNA, 490 bp, unidentified
  misc_feature 1..490: note = Ascusbbf_1805591, encodes 16S rRNA
  source 1..490: mol_type = genomic DNA
agagtttgatcatggctcaggacgaacgctggcggcatgcctaacacatgcaagtcgaacggacgagggtagcaatacccgagttagtggcgaacgggtgagtaacacgtgagcaacctgccctacacactgggatagcagttggaaacgactgataataccggatgagaccacagtcccgcatgggacaggggtcaaagtgaattagcggtgtaggatgggctcgcgtccaattagctagttggtgaggtaacggcccaccaaggcgacgattggtagccgacttgagagagtgatcggccacactggaactgagacacggtccagactcctacgggaggcagaagtggggaatattgggcaatggaggaaactcttacccagcaatgccgcgtgagggatggaggtcctatggattgtaaaactctgttgtttggaaagaatgataagatgaggaaatgcatcttatttgacggtaccattcaagaaa

SEQ ID NO: 6986 - DNA, 490 bp, unidentified
  misc_feature 1..490: note = Ascusbbf_66930, encodes 16S rRNA
  source 1..490: mol_type = genomic DNA
agagtttgatcatggctcagattgaacgctagcggcatgcttaacacatgcaagtcgaacggtaacaggtctagcttgctagatgctgacgagtggcggacgggtgagtaatgcgcaggaatctgccttatagtgggggataacttggggaaacttaagctaataccgcatgtgccttacgaggtaaagcaggggactttcgggccttgtgctataagatgagcctgcgtcggattagctagttggtggggtaaatgcctaccaaggcgacgatccgtagctggtctgagaggatgatcagccacactgggactgagacacggcccagactcctacgggaggcagcagtggggaatattggacaatgggcgcaagcctgatccagcaatgccgcgtgtgtgaagaaggcctgcgggttgtaaagcactttcagtagggaggaaggatttaatgttaataccattaaatattgacgttacctacagaagaa

SEQ ID NO: 6987 - DNA, 490 bp, unidentified
  misc_feature 1..490: note = Ascusbbf_1799186, encodes 16S rRNA
  source 1..490: mol_type = genomic DNA
agagtttgatcctggctcaggatgaacgctagcgagaggcctaacacatgcaagtcgaggggtaacaggggagcttgctcccgctgacgaccggcgcacgggtgagtaacgcgtatgcaacctgcccgccacagggggatagccttccgaaagggagattaagaccgcataagaccacgccggggcatcccggaggggtaaaatattcataggtggcggctgggcatgcgtgacattagctagttggcggggcaacggcccaccaaggcgacgatgtctaggggaactgagaggtcgatcccccacactggtactgagacacggaccagactcctacgggaggcagcagtgaggaatattggtcaatggagggaactctgaaccagccatctcgcgtgaaggaatacggccctacgggtcttaaacttcttttatagggggataaagtgggccacgtgtggtctattgcaggtaccctatgaataagcat

SEQ ID NO: 6988 - DNA, 490 bp, unidentified
  misc_feature 1..490: note = Ascusbbf_103472, encodes 16S rRNA
  source 1..490: mol_type = genomic DNA
agagtttgatcatggctcaggacgaacgctggcggcgcgcctaacacatgcaagtcgaacggacttccggatttagaaacttcggtggacgaagaaggaagttagtggcgaacgggtgagtaacacgtgaggaacctgcctttaagagggggataacacttagaaataggtgctaataccgcataagaccacgctccggcatcgggaagcggtcaaaggagcgatccgcttaaagagggcctcgcgtccgattaggtagttggtgaggtaacggcccaccaagccgacgatcggtagccggactgagaggttgaacggccacattgggactgagacacggcccagactcctacgggaggcagcagtggggaatattgggcaatgggggaaaccctgacccagcgacgccgcgtgagggaagaaggtcttcggattgtaaacctctgtcttcggggacgatagtgactgtacccgaggaggaagccacggc

SEQ ID NO: 6989 - DNA, 490 bp, unidentified
  misc_feature 1..490: note = Ascusbbf_64497, encodes 16S rRNA
  source 1..490: mol_type = genomic DNA
agagtttgatcatggctcagaacgaacgctggcggcgcgtcttaagcatgcaagtcgaatggcaaggggagcttgctccccctagaatggcggactggtgagtaacacgtgggtgacataccctacagttggggatagctactagaaatagtagataataccgaatacgattacaggatttaaaggcctgtaaggaaaggagcttcggctccgctgaaggattggctcgcggcccattagttagttggtgaggtaacggctcaccaaggcaatgatgggtatccggcctgagagggtgatcggacacattgggactgagatacggcccagactcctacgggaggcagcagctaagaatattccgcaatggacgaaagtctgacggagcgacgccgcgtggatgatgaaggccgaaaggttgtaaagtccttttgaattggaagaataagtattgtaggtaatgacagtatggtgacagtacaatttgaat

SEQ ID NO: 6990 - DNA, 490 bp, unidentified
  misc_feature 1..490: note = Ascusbbf_109340, encodes 16S rRNA
  source 1..490: mol_type = genomic DNA
agagtttgatcatggctcaggattaacgctggcggcatgcctaatacatgcaagtcaaacgggaagcttcggcttctagtggcgaacgggtgagtaacacgtaggcaatctgtcctaaagattgggataacagttggaaacggctgataataccggataatagattaagtcgcatgacttgattttgaaagatgcaattgcatcacttttggaggagcctgcggcgcattagatagttggtgaggtaacggcccaccaagtcgatgatgcgtagctgcgctgagaggcgaaacagccacattgggactgagaacggcccaaactcctacgggaggcagcagtagggaattttcggcaatgggggaaaccctgaccgagcaatgccgcgtgaatgatgacgatcttcggattgtaaagttctgttgtagaggacgaatggtaggtagagtggaaagctatctatttgacggtactttactagaaagccccg

SEQ ID NO: 6991 - DNA, 490 bp, unidentified
  misc_feature 1..490: note = Ascusbbf_862606, encodes 16S rRNA
  source 1..490: mol_type = genomic DNA
agagtttgatcatggctcaggatgaacgctagcggcaggcttaacacatgcaagtcgaggggtaacgcggtgtagcaatacactggcgacgaccggcgcacgggtgcgtaacgcgtatgcaacctacctgtaacaggggtataacggggtgaaaatcccactaatcccccatattgttggagattcgcatgattttccaacgaaaggttattctggttacagatgggcatgcgtgacattagctagttggtagggcaacggcctaccaaggcgacgatgtctaggggagctgagaggcttatcccccacactggtactgagacacggaccagactcctacgggaggcagcagtgaggaatattggtcaatggacggaagtctgaaccagccatgccgcgtggaggaagaaggtcctatgggttgtaaactccttttgttcgagagtaataagaggcttgcgagcctcgatgagagtatcggacgaataag

SEQ ID NO: 6992 - DNA, 490 bp, unidentified
  misc_feature 1..490: note = Ascusbbf_74329, encodes 16S rRNA
  source 1..490: mol_type = genomic DNA
agagtttgatcatggctcagaacgaacgctggcggcgcgtcttaagcatgcaagtcggacggcaagatgagagcttgctcttatcctagagtggcggactggtgagtaacgcgtgggtgacgtaccctccggacggggatagctcctagaaataggaggtaataccggatacggtgcactgtgtcagaggcagtgcaggaaaggaacttttgttccgccggaggagcggcccgcgtgctattagcttgttggcggggtaacggcccaccaaggcgacgatagctacccggcctaagagggtgatcgggcacattgggactgagatacggcccagactcctacgggaggcagcagctaagaatattccgcaatgggggaaaccctgacggagcgacgccgcgtggacgatgaaggccggaaggttgtaaagtccttttaagtacgaggaataaggaaagtgagagaaacgctttctggtgacggtagtgct

SEQ ID NO: 6993 - DNA, 490 bp, unidentified
  misc_feature 1..490: note = Ascusbbf_50127, encodes 16S rRNA
  source 1..490: mol_type = genomic DNA
agagtttgatcatggctcaggatgaacgctggcggcgtgcttaacacatgcaagtcgaacgaagcaattcgattcaaagcttcggcagcgaagagaattgacttagtggcggacgggtgagtaacgcgtgggtaacctgcctcaagctgggggataacagttagaaatgactgctaataccgcataagaccccggtaccgcatggtacagaggtaaaagatttatcggcctgagatggacccgcgtctgattagctagttggtgaggtaacggcccaccaaggctgcgatcagtagccgacctgagagggtgatcggccacattgggactgagacacggcccaaactcctacgggaggcagcagtggggaatattgcacaatgggggaaaccctgatgcagcgacgccgcgtgagtgaagaagtatttcggtatgtaaagctctttaagcagggaagataatgacggtacctgcagaataagcaccggct

SEQ ID NO: 6994 - DNA, 490 bp, unidentified
  misc_feature 1..490: note = Ascusbbf_110581, encodes 16S rRNA
  source 1..490: mol_type = genomic DNA
agagtttgatcatggctcaggacgaacgctggcggcgtgcttaacacatgcaagtcgaacggggtccaaccggtcgcaagaccggggaagaccgagtggcgaacgggtgcgtaacacgtgagaaacctgtcccggactctggaataacagtcggaaacgactgctaataccggatgccgtcggagcgtcgcatggcgcactgacgaaagtgttagcggttcgggagggtctcgcggcctatcagcttgttggtgaggtaacggctcaccaaggcatcgacgggtagctggtctgagaggatgatcagccacactgggactgagacacggcccagactcctacgggaggcagcagtggggaatcttgcacaatgggcgaaagcctgatgcagcaacgccgcgtgcgggaagaaggccctagggttgtaaaccgctttcagcagggaagaaaatgacggtacctgcagaagaaggtgcggccaactacgtgc

SEQ ID NO: 6995 - DNA, 490 bp, unidentified
  misc_feature 1..490: note = Ascusbbf_386387, encodes 16S rRNA
  source 1..490: mol_type = genomic DNA
agagtttgatcctggctcaggacgaacgctggcggcgtgcttaacacatgcaagtcgaacgaggatcatttggaagcttgcttccgggtgattcgagtggcggacgggtgagtaacgcgtgaggaacctgtctcatacagggggataacgcatcgaaagatgtgctaataccgcataggaccacagcatcgcatggtgcaggggtgaaaggaggaatccggtatgaggtggactcgcgtctgattagatagttggtgaggtaacggcccaccaagtcaacgatcagtagccgacctgagagggtgatcggccacattgggactgagacacggcccagactcctacgggaggcagcagtggggaatattgggcaatgggcgcaagcctgacccagcaacgccgcgtgagggaagaaggttttcggattgtaaacctctgtcctatgcgaagagtgagagacggtagcataggaggaagccccggctaacta

SEQ ID NO: 6996 - DNA, 490 bp, unidentified
  misc_feature 1..490: note = Ascusbbf_1499256, encodes 16S rRNA
  source 1..490: mol_type = genomic DNA
agagtttgatcatggctcaggatgaacgctagctacaggcttaacacatgcaagtcgagcggaacaccttcgggtgtttagcggcagacgggtgagtaacacgtatccaacctttcccttactcgggtatagcctcgggaaactgagagtaatccccgatgtggtgcacggaaagcattttttgcgcacgaaagattaatcggtaaggggtggggatgcgttccattaggtagtaggcggggtaacggcccacctagccgatgatggataggggttctgagaggaaggtcccccacattggaactgcgacacggtccaaactcctacgggaggcagcagtgaggaatattggtcaatgggcgagagcctgaaccagccaagtagcgtgcaggacgactgccctgtgggttgtaaactgcttttatcagggaataaagtgcggcacgtgtgccgttttgtatgtaccagatgaataaggaccggctaattc

SEQ ID NO: 6997 - DNA, 490 bp, unidentified
  misc_feature 1..490: note = Ascusbbf_142298, encodes 16S rRNA
  source 1..490: mol_type = genomic DNA
agagtttgatcctggctcaggacgaacgctggcggcgtgcttaacacatgcaagtcgaacgaggtccagggagcttgctcccgaagacctagtggcgaacgggtgcgtaacacgtgagaaacctgccccggacttgggaataacagtcggaaacgactgctaataccgaataccgtcggagcgtcgcatggcgcatcgacgaaagcttttgcggtctgggagggtctcgcggcctatcagcttgttggtgaggtaacggctcaccaaggcatcgacgggtagctggtctgagaggatgatcagccacactgggactgagacacggcccagactcctacgggaggcagcagtggggaatcttgcacaatgggcgaaagcctgatgcagcaacgccgcgtgcgggaagaaggccctagggttgtaaaccgctttcagcagggaagaaaatgacggtacctgcagaagaaggtgcggccaactacgtgccagc

SEQ ID NO: 6998 - DNA, 490 bp, unidentified
  misc_feature 1..490: note = Ascusbbf_141568, encodes 16S rRNA
  source 1..490: mol_type = genomic DNA
agagtttgatcatggctcagaacgaacgctggcggcgcgttttaagcatgcaagtcgagcggcagtagcaatacgagagcggcggacgggtgagtaacacgtgggtaatccgccttccagtcggggatagcctgtggaaacacaggataataccggatgcgatgtccaccacacaagtggaggacaggaaaggggccaaggccccgctgggagatgagcccgcgtcccattagcttgatggtgaggtaaaggcccaccatggcgatgatgggtagccggcctgagagggtgaacggccacattggaactgagacacggtccagactcctacgggaggcagcagctaagaatcttccacaatggacgaaagtctgatggagcgacgccgcgtgggcgatgaaggccgtgaggttgtaaagcccttttcttgagggggaataaacggaccagggaatgggtccgcgatgacgtgaatcaaggaataagcccc

SEQ ID NO: 6999 - DNA, 490 bp, unidentified
  misc_feature 1..490: note = Ascusbbf_726969, encodes 16S rRNA
  source 1..490: mol_type = genomic DNA
agagtttgatcatggctcagaacgaacgctggcggcgcgtcttaagcatgcaagtcgagcgggattatccagcttgctggatatgagagcggcggactggtgagtaacgcgtgggtgacgtgcccttctgcccgggatagccggtagaaataccggataataccggatgagctccgcggcgctggaggccgcggaggaaaggagctattgttccgcggaaggagcggcccgcgtcccatcagctggttggcggggaaaaggcccaccaaggcgatgacgggtacccggcctcagagggcgaccgggcacattgggactgagatacggcccagactcctacgggaggcagcagctaagaatattccgcaatgggggaaaccctgacggagcgacgccgcgtggacgacgaaggccggaaggttgtaaagtccttttgtggctgaggaagaagggcaggtcggaagcctgtccggtgactgtaggccatgaa

SEQ ID NO: 7000 - DNA, 490 bp, unidentified
  misc_feature 1..490: note = Ascusbbf_189702, encodes 16S rRNA
  source 1..490: mol_type = genomic DNA
agagtttgatcatggctcaggatgaacgctggcggcgtgcctaatacatgcaagtcgaacgaggtggatgggagcttgctccttgataccgagtggcgaacgggtgagtaacacgtaggtaacctaccttacagtttgggatacccgagggaaaccttggctaataccggataattctttaggaggcatctcctgaagctaaaaggggctccaaagcctcgctgaaagatggacctgcggcgcattagctagttggtgagataacagcccaccaaggcgaggatgcgtagccgacctgagagggtgaacggccacactggaactgagacacggtccagactcctacgggaggcagcagtagggagttttcggcaatgggggaaaccctgaccgagcaacgccgcgtgagtgatgaaggtcttcggattgtaaagctctgttgtaggggaagaatgatagcttgaggaaatgctagctatttgacggtacc

SEQ ID NO: 7001 - DNA, 490 bp, unidentified
  misc_feature 1..490: note = Ascusbbf_281979, encodes 16S rRNA
  source 1..490: mol_type = genomic DNA
agagtttgatcatggctcaggatgaacgctggcggcgtgcttaacacatgcaagtcgaacgaagcactttttcttcttcggaagagaaagtgactgagtggcggacgggtgagtaacgcgtgggtaacctgccttatacagggggataacagttggaaacgactgctaataccgcataagccaacgaggccgcatggcctagttggaaaagatttatcggtataagatggacccgcgtctgattagctagttggtgaggtaacggcccaccaaggcgacgatcagtagccggcttgagagagtgaacggccacattgggactgagacacggcccaaactcctacgggaggcagcagtggggaatattgcacaatgggggaaaccctgatgcagcaacgccgcgtgaaggaagaagtatttcggtatgtaaacttctatcagcaggaaagaaaatgacggtacctgactaagaagccccggctaactacgt

SEQ ID NO: 7002 - DNA, 490 bp, unidentified
  misc_feature 1..490: note = Ascusbbf_715191, encodes 16S rRNA
  source 1..490: mol_type = genomic DNA
agagtttgatcatggctcaggatgaacgctggcggcgtgcctaacacatgcaagtcgagcgagaaacttttgactgacgcttcggttgatttcaaaagcggaaagcggcggacgggtgagtaacgcgtaggcaacctgccctttgcagagggatagcctcgggaaaccgggattaaaacctcataacaccggagtacctcatggtgcaccggtcaaagatttatcggcagaggatgggcctgcgtctgattagctggttggtggggtaacggcctaccaaggcaatgatcagtagccgacctgagagggtgatcggccacattggaactgagacacggtccaaactcctacgggaggcagcagtggggaatattgcacaatgggcgaaagcctgatgcagcaacgccgcgtgagcgatgaaggcggattcgtcgtaaagctctgtccttggggaagaagaactgacggtacccttggaggaagccccggc

SEQ ID NO: 7003 - DNA, 490 bp, unidentified
  misc_feature 1..490: note = Ascusbbf_1741831, encodes 16S rRNA
  source 1..490: mol_type = genomic DNA
agagtttgatcatggctcaggatgaacgctagcggcaggcttaacacatgcaagtcgaggggcatcgcgggggtagcaatacacctggcggcgaccggcggaagggtgcgtaacgcgtgagcaacatgcccgtcacagggggataacagatggaaacgtctcctaataccccgtaacatcttgggtggcatcatctgaggttgaaagctattatgcggtgacggattggctcgcgtgacattagctagttggagtggtaacggcacaccaaggcgacgatgtctaggggttctgagaagaaggtcccccacactggaactgagacacggtccagactcctacgggaggcagcagtgaggaatattggtcaatgggcggaagcctgaaccagccatgccgcgtgaaggaataaggtcctatggatcgtaaacttcttttgtacgggagcaataagggcgtcgagacgtccgatgagagtaccgtacgaata

SEQ ID NO: 7004 - DNA, 490 bp, unidentified
  misc_feature 1..490: note = Ascusbbf_320610, encodes 16S rRNA
  source 1..490: mol_type = genomic DNA
agagtttgatcctggctcaggatgaacgctggcggcgtgcctaacacatgcaagtcgagcggagatatgcaccggaagaagattcgtctgattccaccgcgtatcttagcggcggatgggtgagtaacacgtggacaacctacccataactgggggatagcagttggaaacgactgataataccgcatatgctcacgggaccgcatggtccagggaggaaagatttatcggttatggatgggtccgcgtcggattaactagttggtgaggtaacggcccaccaaggtgatgatccgtagccggcctgagagggcgaccggccacattgggactgagacacggcccagactcctacgggaggcagcagtggggaatattgcacaatgggcgcaagcctgatgcagcgacgccgcgtgaaggaagaagtactccggtatgtaaacttctatcagcagggaagaagatgacggtacctgactaagaagccccg

SEQ ID NO: 7005 - DNA, 490 bp, unidentified
  misc_feature 1..490: note = Ascusbbf_715599, encodes 16S rRNA
  source 1..490: mol_type = genomic DNA
agagtttgatcctggctcaggatgaacgctggcggcgtgcctaacacatgcaagtcgagcggagatgtcacaccggaagaagattcgtctgaatccaccgtgacattcttagcggcggatgggtgagtaacacgtggacaacctacccaggacagggggataacaaccggaaacgggtgctaataccgcatagattgtcggaccgcatgatctgacaaggaaagatttatcggttctggatgggtccgcgtcggattaactagttggtgaggtaacggcccaccaaggtgatgatccgtagccggcctgagagggcgaccggccacattgggactgagacacggcccagactcctacgggaggcagcagtgggggatattgcacaatgggggaaaccctgatgcagcgacgccgcgtgaaggaggaaatacttcggtatgtaaacttctatcagcagggaagaagatgacggtacctgactaagaagccc

SEQ ID NO: 7006 - DNA, 490 bp, unidentified
  misc_feature 1..490: note = Ascusbbf_83139, encodes 16S rRNA
  source 1..490: mol_type = genomic DNA
agagtttgatcctggctcaggatgaacgctggcggcgtgcctaacacatgcaagtcgaacggaccttattacgacagagacttcggtcgaagaaattttaaggttagtggcggacgggtgagtaacgcgtggagaacctgccctgtactgggggataacagtgagaaattactgctaataccgcataagcgcacgggaccgcatggtcctgagtgaaaaactccggtggtacaggatggctccgcgttggattagccagttggcggggtaacggcccaccaaagcgacgatccatagccggcctgagagggtgaacggccacattgggactgagacacggcccagactcctacgggaggcagcagtggggaatattgcacaatggggggaaccctgatgcagcgacgccgcgtgaaggaagaagtatctcggtatgtaaacttctatcagcagggaagaaaatgacggtacctgactaagaagccccggc

SEQ ID NO: 7007 - DNA, 354 bp, unidentified
  misc_feature 1..354: note = Ascusbbf_188005, encodes 16S rRNA
  source 1..354: mol_type = genomic DNA
agagtttgatcctggctcaggacgaacgctggcggcgtgcttcatacatgcaagtcgaacgagaatctctagcttgctagagaggaaagtggcggacgggtgagtaaaatgtagagaatctgcccttgagagggggacaacagttggaaacggctgctaataccccatatgagcgtacctgagatggtattcttgaaaactccggtgctcaaggatgagtctgcatctgattagctagttggcggggtaatggcccaccaaggcgacgatcagtagctggtttgagaggatgatcagccacaatgggactgagacacggcccatactcctacgggagccagcagccgcggtaat

SEQ ID NO: 7008 - DNA, 490 bp, unidentified
  misc_feature 1..490: note = Ascusbbf_1558883, encodes 16S rRNA
  source 1..490: mol_type = genomic DNA
agagtttgatcctggctcagaacgaacgctggcggcaggcttaacacatgcaagtcgagcgggcccttcggggtcagcggcagacgggtgagtaacgcgtgggaacgtaccatttgctacggaataactcagggaaacttgtgctaataccgtatgagcccccctttaaaatttcaggaatcataaaatgccctggcattttatgggggggaaagatttatcggcaaatgatcggcccgcgttggattagctagttggtggggtaaaggcctaccaaggcgacgatccatagctggtctgagaggatgatcagccacactgggactgagacacggcccagactcctacgggaggcagcagtggggaatattggacaatgggcgcaagcctgatccagccatgccgcgtgagtgatgaaggccctagggttgtaaagctctttcaccggtgaagataatgacggtaaccggagaagaagccccggctaact

SEQ ID NO: 7009 - DNA, 490 bp, unidentified
  misc_feature 1..490: note = Ascusbbf_7341, encodes 16S rRNA
  source 1..490: mol_type = genomic DNA
agagtttgatcatggctcagaacgaacgctggcggcgcgtcttaagcatgcaagtcgagcggtaagttatagcttgctataacctagagcggcggactggtgagtaacgcgtgggtgacgtacccttttgacggggatagcctgtggaaacacagggtaataccggataagctcgtatgtgtcagaggcatacgaggaaaggttcttttgaaccgcgaaaggagcggcccgcgtgctattagttagttggcggggtaacggcccaccaagacgacgatagctacccggcctaagagggtgaacgggcacattgggactgagatacggcccagactcctacgggaggcagcagctaagaatattccgcaatggacgaaagtctgacggagcgacgccgcgtggatgatgaaggccggaaggttgtaaaatccttttgggagcgaggaataatgaaagtgagagaaacgctttcaggtgacggtagcttctg

SEQ ID NO: 7010 - DNA, 490 bp, unidentified
  misc_feature 1..490: note = Ascusbbf_33567, encodes 16S rRNA
  source 1..490: mol_type = genomic DNA
agagtttgatcatggctcaggatgaacgctggcggcgtgcttaacacatgcaagtcgaacgaggaataattgatgaagttttcggatggatttgattattccgagtggcggacgggtgagtaacgcgtgggtaacctgccccatacagggggacaacagagggaaacttctgctaataccgcataagcggatcggatggcatcgtccggttcggaaagctccggcggtatgggatgggcccgcgttggattaggcagttggcggggtaacggcccaccaaaccgacgatccatagccgacctgagagggtgaccggccacattgggactgagacacggcccagactcctacgggaggcagcagtggggaatattgcacaatgggcgaaagcctgatgcagcgacgccgcgtgagtgaagaagtatttcggtatgtaaagctctatcagcagggaagaagatgacggtacctgcacaagaagctccggcta

SEQ ID NO: 7011 - DNA, 490 bp, unidentified
  misc_feature 1..490: note = Ascusbbf_282570, encodes 16S rRNA
  source 1..490: mol_type = genomic DNA
agagtttgatcctggctcaggatgaacgctggcggcatgcctaagacatgcaagtcgaacgaagaggccctttgaaattggagtgcttgcacaaagatggatttggattttctcttagtggcagacgggtgagtaacgcgtgggtaatctacctcaaagactgggataacttctggaaacggacgctaataccggataacacatatttagataactagatatgttaaaaggtgcttcggcatcactttgagatgagcttgcgttgtattagctagttggtggggtaatggcctaccaaggcaacgatgcatatccgagctgagaggctgatcggacacattgggactgagacacggcccagactcctacgggagacagcagttaggaatattcgtcaatgggggaaaccctgaacgagcaatgccgcgtgaatgatgacaatcctctggattgtaaaattctgttgtaaaggacgaacccttactatagg

SEQ ID NO: 7012 - DNA, 490 bp, unidentified
  misc_feature 1..490: note = Ascusbbf_37803, encodes 16S rRNA
  source 1..490: mol_type = genomic DNA
agagtttgatcctggctcaggacgaacgctggcggcgtgcctaacacatgcaagtcgaacggagtgttgcgctgaattgatagcagcttgctgaaggattttcttgtaacacttagtggcggacgggtgagtaacgcgtgagcaacctgccttacagagggggacaacattgggaaaccgatgctaataccgcataacgtgcagacgggacatcccgactgtaccaaaggagcaatccgctgtaagatgggctcgcgtccgattagatagttggaggggtaacggcccaccaagtcgacgatcggtagccggactgagaggttgaacggccacattgggactgagacacggcccagactcctacgggaggcagcagtgggggatattgcacaatggaggaaactctgatgcagcaacgccgcgtgagggaagaaggttttcggattgtaaacctctgtttttagtgacgaaacaaatgacggtagctaaa

SEQ ID NO: 7013 - DNA, 490 bp, unidentified
  misc_feature 1..490: note = Ascusbbf_85601, encodes 16S rRNA
  source 1..490: mol_type = genomic DNA
agagtttgatcctggctcaggacgaacgctggcggcgtgcttaacacatgcaagtcgaacgaagctctcacactcgagttttcggacaagagagtgagatgacttagtggcggactggtgagtaacgcgtgagcaacctgccctccggtgggggacaacagctggaaacggctgctaataccgcatgatgtgtatggaccgcatgatctgtacaccaaagctttatgtgccggaggatgggctcgcgtctgattaggtagttggtggggtaacggcctaccaagccgacgatcagtagccggactgagaggttgaacggccacattgggactgagatacggcccagactcctacgggaggcagcagtggggaatattgggcaatggacgaaagtctgacccagcaacgccgcgtgaaggaagaaggtcttcggattgtaaacttctttgacagaggacgataatgacggtactctgaaaacaagccacgg

SEQ ID NO: 7014 - DNA, 490 bp, unidentified
  misc_feature 1..490: note = Ascusbbf_29038, encodes 16S rRNA
  source 1..490: mol_type = genomic DNA
agagtttgatcatggctcaggacgaacgctggcggcgtgcctaacacatgcaagtcgaacggagttttacgctgaaattgagattagcttgctaaaggatatttcttgtaacacttagtggcggacgggtgagtaacgcgtgaggaacctgccttacagagggggacaacagttggaaacgactgctaataccgcataacatagcgagaggacatcctcttgttatcaaaggagcaatccgctgtaagatggcctcgcgtccgattagatagttggtgaggtaacggcccaccaagtctacgatcggtagccggactgagaggttgaacggccacattgggactgagacacggcccagactcctacgggaggcagcagtgggggatattgcacaatggaggaaactctgatgcagcaacgccgcgtgagggaagaaggttttcggattgtaaacctctgtttttggtgaagaaacaaatgacggtagcca

SEQ ID NO: 7015 - DNA, 490 bp, unidentified
  misc_feature 1..490: note = Ascusbbf_179401, encodes 16S rRNA
  source 1..490: mol_type = genomic DNA
agagtttgatcatggctcaggacgaacgctggcggcgtgcttaacacatgcaagtcgaacgaggctgtattgggagcttgcttttgatacagccgagtggcggacgggtgagtaacgcgtgagcaacctgtctcatacagggggataacgcaccgaaaggtgtgctaataccgcataagaccacagcctcgcatgggggaggggtcaaaggaggaatccggtatgaggtgggctcgcgtctgattagatagttggtgaggtaacggcccaccaagtcaacgatcagtagccgacctgagagggtgatcggccacattggaactgagagacggtccaaactcctacgggaggcagcagtggggaatattgggcaatgggcgcaagcctgacccagcaacgccgcgtgagggaagaaggttttcggattgtaaacctctgtcctgaatgaaaaggagtagatggtaattcaggaggaagccccggctaacta

SEQ ID NO: 7016 - DNA, 490 bp, unidentified
  misc_feature 1..490: note = Ascusbbf_108191, encodes 16S rRNA
  source 1..490: mol_type = genomic DNA
agagtttgatcctggctcaggacgaacgctggcggcgtgcttcatacatgcaagtcgaacgataaggcaccttcgggtgtacataagtggcggacgggtgagtaaaatgtagagaatctgccctagagagtgggacaacagagggaaacttctgctaataccgcatatgcgcgtagctgagatgctattcgtgaaaactccggtgctctgggatgagtctgcatctgattagctagttgggggtgtaatggaccaccaaggcgacgatcagtagctggtttgagaggatgatcagccacaatgggactgagacacggcccatactcctacgggaggcagcagtagggaattttgcgcaatggggggaaccctgacgcagcaacgccgcgtgaccgaagaagcccttcggggtgtaaaggtctgtcagtggggacgaaaaatgacggtacccacagaggaagcatcggctaactccgtgccagcagccgcg

SEQ ID NO: 7017 - DNA, 490 bp, unidentified
  misc_feature 1..490: note = Ascusbbf_20388, encodes 16S rRNA
  source 1..490: mol_type = genomic DNA
agagtttgatcatggctcaggatgaacgctagcggcaggcttaacacatgcaagtcgaggggcagcgtggagtagcaatactctgacggcgaccggcgaaagggtgagtaacgcgtgagcaacatgcccgatagtggaggatagtcgatggaaacgtcgcgtaatactccgtaacacagggaaccgcatgattttctgttaatagatttatcgctatcggattggctcgcgtaccattagctagttggcggggtaacggcccaccaaggcgacgatggttaggggttctgagaggaaggtcccccacattggaactgagacacggtccagactcctacgggaggcagcagtgaggaatattggacaatggccggaaggctgatccagccatgccgcgtgcgggaagacggccctatgggttgtaaaccgcttttgttggggagcaataagtcctacgtgtaggatgatgagagtacccagcgaataagca

SEQ ID NO: 7018 - DNA, 490 bp, unidentified
  misc_feature 1..490: note = Ascusbbf_25166, encodes 16S rRNA
  source 1..490: mol_type = genomic DNA
agagtttgatcatggctcaggacgaacgctggcggcgtgcctaacacatgcaagtcgaacggagctgaagagcttgcttttcagcttagtggcggacgggtgagtaacgcgtgagtaacctgcctccgagagtggaataacgttttgaaaagaacgctaataccgcataaagcacaagagtcgcatggctaatgtgccaaagattttatcgctcggagatggactcgcgtccgattagttagttggtgaggtaacggctcaccaagaccgcgatcggtagccggactgagaggttgaacggccacattgggactgagacacggcccagactcctacgggaggcagcagtgggggatattgcgcaatgggggaaaccctgacgcagcaacgccgcgtgaaggatgaaggttttcggattgtaaacttcttttatcagggacgaaaaacgacggtacctgaagaataagctccggctaactacgtgccagca

SEQ ID NO: 7019 - DNA, 490 bp, unidentified
  misc_feature 1..490: note = Ascusbbf_70668, encodes 16S rRNA
  source 1..490: mol_type = genomic DNA
agagtttgatcctggctcaggatgaacgctagcggcaggcttaacacatgcaagtcgaggggcagcggggcccagcaatgggctgccggcgaccggcgcacgggtgcgtaacgcgtatgcaacctgcccgcgacagggggataaccggtggaaacgccgactaataccccgtaatgcactaagtcgcatggcttggtgctgaaagcttcggtggtcgcggatgggcatgcgtggcattaggtagttggcggggcaacggcccaccaagcctacgatgcctaggggagctgagaggctaatcccccacactggtactgagacacggaccagactcctacgggaggcagcagtgaggaatattggtcaatgggcggaagcctgaaccagccatgccgcgtgtgggaagaaggccctatgggttgtaaaccacttttagccgggagtaataaggggcgtgcgcgccccgatgagagtaccggcggaataagca

SEQ ID NO: 7020 - DNA, 490 bp, unidentified
  misc_feature 1..490: note = Ascusbbf_13626, encodes 16S rRNA
  source 1..490: mol_type = genomic DNA
agagtttgatcatggctcaggacgaacgctggcggcgtgcctaacacatgcaagtcgaacggactgattcccttcggggatgaaagtcagtggcggatgggtgagtaacgcgtgaggaacctgcctctcagagggggataacgtttggaaacgaacgctaataccgcataacgcttttgtaccgcatgatacggaagccaaaggagcgatccgctgagagatggcctcgcgtctgattagatagttggtgaggtaacggcccaccaagtcgacgatcagtagccggactgagaggttgaacggccacattgggactgagacacggcccagactcctacgggaggcagcagtgagggatattgcacaatgggcgaaagcctgatgcagcaacgccgcgtgagggaagacggttttcggattgtaaacctctgttccggggaaggaagacagtgacctacccgggagcaagccacggctaactacgtgccag

SEQ ID NO: 7021 - DNA, 490 bp, unidentified
  misc_feature 1..490: note = Ascusbbf_28027, encodes 16S rRNA
  source 1..490: mol_type = genomic DNA
agagtttgatcatggctcaggatgaacgctggcggcgcgcctaacacatgcaagtcgaacggtgatactttcttcggaaagaggatcagtggcgaacgggtgagtaacgcgtgggtaacctgcccttgacacagggatagcaaagggaaacttttggtaatacctgatgacctcaaaaagtgacatctctttttgagcaaagaatttcggtcgaggatggacccgcgtcccatcagctagatggcggggtaacggcccaccatggcaattacgggtagccggactgagaggtcgatcggccacattgggactgagacacggcccagactcctacgggaggcagcagtggggaatattgcgcaatgggggaaaccctgacgcagcgacgccgcgtgcgggatggaggccttcgggctgtgaaccgctttcggtggggaggaaattgaccgtacccacataagaagccccggctaactacgtgccagcagcc

SEQ ID NO: 7022 - DNA, 490 bp, unidentified
  misc_feature 1..490: note = Ascusbbf_101197, encodes 16S rRNA
  source 1..490: mol_type = genomic DNA
agagtttgatcctggctcaggatgaacgctagcggcaggcctaacacatgcaagtcgaggggtatatagtgcttgcactatagagaccggcgcacgggtgcgtaacgcgtatgcaacctaccttttacagggggatagcccggagaaatccggattaataccccatagtattgagtgccagcattggaattcaattaaagatttatcggtaaaagatgggcatgcgtcctattagctagttggtatggtaacggcataccaaggcaatgataggtaggggccctgagagggggatcccccacactggtactgagacacggaccagactcctacgggaggcagcagtgaggaatattggacaatgggcgagagcctgatccagccatgccgcgtgcaggaagactgccctatgggttgtaaactgcttttatacaggaagaataagaggcacgtgtgctttgatgacggtactgtatgaataagcatcggc

SEQ ID NO: 7023 - DNA, 490 bp, unidentified
  misc_feature 1..490: note = Ascusbbf_549008, encodes 16S rRNA
  source 1..490: mol_type = genomic DNA
agagtttgatcctggctcaggatcaacgctggcggcgtgcctaatgcatgcaagtcgagcggggtgatcttcggatcacttacgcggcggacgggtgcggaacacgtgggcaacctgccccgaggtgggggatagccggtggaaacaccgggtaattccgcatgaggtcactggtcgggagacgagtgaggaaagggtcttcggactcgccttgggaggggcctgcggccgattagctagacggtggggtaacggcctaccgtggcgatgatcggtagctggtctgagaggacggccagccacacggggactgagacacggccccgactcctacgggaggcagcagcaaggaatcttccgcaatgggcgaaagcctgacggagcaacgccgcgtgtgggatgacgcctttcggggtgtaaaccacttttctcagggaagaagcactgacggtacctgaggaagaaggaccggctaactacgtgccagcag

SEQ ID NO: 7024 - DNA, 490 bp, unidentified
  misc_feature 1..490: note = Ascusbbf_30047, encodes 16S rRNA
  source 1..490: mol_type = genomic DNA
agagtttgatcctggctcagaacgaacgctggcggcgcgttttaagcatgcaagtcgagcggcagcagcaatgcgagagcggcggacgggtgagtaacacgtgggtaatctgccctccggtcgggaatagcctgtggaaacacaggataataccggatgcgatggccaccacacaagtggaggtcaggaaaggagccaaggctccgccggaggatgagcccgcgtcccattagcttgatggtgaggtaaaggcccaccatggcgatgatgggtagccggcctgagagggtgaacggccacattggaactgagacacggtccagactcctacgggaggcagcagctaagaatcttccacaatggacgaaagtctgatggagcgacgccgcgtgggcgatgaaggccgtgaggttgtaaagcccttttcttgagggggaataagtccggcagggaatggccggatgatgacgtgaatcaaggaataagcccc

SEQ ID NO: 7025 - DNA, 490 bp, unidentified
  misc_feature 1..490: note = Ascusbbf_50534, encodes 16S rRNA
  source 1..490: mol_type = genomic DNA
agagtttgatcatggctcaggacgaacgctggcggcgtgcttaacacatgcaagtcgaacgaggtttattgaagagcttgctctgaggtagaccgagtggcggacgggtgagtaacgcgtgaggaacctgtcttacacagggggataacgcaccgaaaggtgtgctaataccgcataagaccacactttcgcatggaagaggggtcaaaggagcgatccggtgtaaggtggactcgcgtcccattaggcagttggcggggtaacggcccaccaaaccgacgatgggtagccgacctgagagggtgatcggccacattggaactgagacacggtccaaactcctacgggaggcagcagtggggaatattgggcaatgggcgcaagcctgacccagcaacgccgcgtgagggaagaaggttttcggattgtaaacctctgtcctcgatgaaaaggagaagatggtaattgaggaggaagccccggctaacta

SEQ ID NO: 7026 - DNA, 490 bp, unidentified
  misc_feature 1..490: note = Ascusbbf_303159, encodes 16S rRNA
  source 1..490: mol_type = genomic DNA
agagtttgatcctggctcaggacgaacgctggcggcgtgcttaacacatgcaagtcgaacgaagcttgatttcagatttcttcggaatgacgaatgatatgactgagtggcggacgggtgagtaacgcgtgagcaacctgcccttcagagggggatagcgtctggaaacggacggtaataccgcataacgtgcgaggaaggcatctttcttgtaccaaagatttatcgctgagggatgggctcgcgtctgattagatagttggtggggtaacggcctaccaagtcgacgatcagtagccggactgagaggttgaacggccacattgggactgagacacggcccagactcctacgggaggcagcagtggggaatattgcacaatgggcgcaagcctgatgcagcaacgccgcgtggaggaagacggttttcggattgtaaactcctgttcttaaggaagaagaaagtgacggtacttaaggagcaagccac

SEQ ID NO: 7027 - DNA, 490 bp, unidentified
  misc_feature 1..490: note = Ascusbbf_52307, encodes 16S rRNA
  source 1..490: mol_type = genomic DNA
agagtttgatcatggctcaggatgaacgctggcggcgtgcttaacacatgcaagtcgaacggttaaaccgccttcgggcggacatagagtggcgaacgggtgagtaacacgtgaccaacctgccccgcgcaccgggacagccccccgaaagggggattaataccggatactccggcggccccgcatggggcggccgggaaggctccggcggcgcgggatggggtcgcggcccatcaggtagtaggtcgggtagaggccgacctagccgacgacgggtagccgggttgagagaccgaccggccacattgggactgagatacggcccagactcctacgggaggcagcagtggggaatattgcgcaatgggggaaaccctgacgcagcaacgccgcgtgcgggatgacggccttcgggttgtaaaccgctttcagcagggaagacatcgactgtacctgcacaagaagccccggctaactacgtgccagcagc

SEQ ID NO: 7028 - DNA, 490 bp, unidentified
  misc_feature 1..490: note = Ascusbbf_5721, encodes 16S rRNA
  source 1..490: mol_type = genomic DNA
agagtttgatcatggctcaggatgaacgctggcggcgtgcttaacacattcaagtcgaacgggcgagaggaagcaattccttttgctagtggcggacgggtgagtaacgcgtgagcaacctacctttacgagtgggataacaattggaaacgattgctaataccgcataatgtatagataccgcatgatatctataccaaagaaaatcgcgtaaagatgggctcgcgtcccattagacagttggtgaggtaacggcccaccaaatctacgatgggtagccggactgagaggttgaacggccacattggaactgagaaacggtccagactcctacgggaggcagcagtggggaatattgggcaatgggcgaaagcctgacccagcgacgccgcgtgaaggaagaaggtcttcggattgtaaactttagtcaacagggaagaagaaagtgacggtacctgtagaggaagccacggctaactacgtgccagca

SEQ ID NO: 7029 - DNA, 490 bp, unidentified
  misc_feature 1..490: note = Ascusbbf_100583, encodes 16S rRNA
  source 1..490: mol_type = genomic DNA
agagtttgatcatggctcaggacgaacgctggcggcgtgcctaacacatgcaagtcgaacggagtgttacgctgaaaccgagagcagcttgctgcaggaagtttcttgtaacacttagtggcggacgggtgagtaacgcgtgagcaacctgccttacagagggggacaacagttggaaacgactgctaataccgcataacatagcgagtgggcatccacttgttatcaaaggagcaatccgctgtaagatgggctcgcgtccgattagccagttggcggggtaacggcccaccaaagctacgatcggtagccggactgagaggttgaacggccacattgggactgagacacggcccagactcctacgggaggcagcagtgggggatattgcacaatggaggaaactctgatgcagcaacgccgcgtgagggaagaaggtcttcggattgtaaacctctgttttcggtgaagaaacaaatgacggtagccg

SEQ ID NO: 7030 - DNA, 490 bp, unidentified
  misc_feature 1..490: note = Ascusbbf_118811, encodes 16S rRNA
  source 1..490: mol_type = genomic DNA
agagtttgatcctggctcaggacgaacgctggcggcatgcctaacacatgcaagtcgaacgagatagcaatatctagtggcgaacgggtgagtaacacgtgagcaatctgccccatatacagggataacagttagaaatgactgctaataccggataagaccacagcctggcatcgggcaggggtcaaagcgatttagcgatatgggatgagctcgcgtccaattagctagttggtgaggtaacggcccaccaaggcgacgattggtagccgacctgagagggtgatcggccacattggaactgagacacggtccaaactcctacgggaggcagcagtggggaatattgggcaatggaggaaactcttacccagcaatgccgcgtgagtgatgaaggtcctctggattgtaaaactctttgattagggacgaacgaatgacggtacctaaagaacaagccccggctaactatgtgccagcagccgcggta

SEQ ID NO: 7031 - DNA, 490 bp, unidentified
  misc_feature 1..490: note = Ascusbbf_1775092, encodes 16S rRNA
  source 1..490: mol_type = genomic DNA
agagtttgatcatggctcaggatgaacgctggcggcgtgcctaacacatgcaagtcgagcggagtgcagtgtctaagaggcttcggccgaattaatctgtacttagcggcggatgggtgaggaacgcgtggagaacctgcccttcacagggggataacagttggaaacgactgttaataccgcatatgctcacagtgccgcatggcacagggaggaaagcctagacggtgaaggatggctccgcgtcggattagccagttggcggggtaacggcccaccaaagcgatgatccgtagccggcatgagagggcgaccggccacattgggactgagacacggcccaaactcctacgggaggcagcagtgggggatattgcacaatggggggaaccctgatgcagcgacgccgcgtgaaggaggaagtgcttcggcatgtaaacttctatcagcagggaagaagatgacggtacctgcacaagaagccccggct

SEQ ID NO: 7032 - DNA, 490 bp, unidentified
  misc_feature 1..490: note = Ascusbbf_154105, encodes 16S rRNA
  source 1..490: mol_type = genomic DNA
agagtttgatcatggctcagattgaacgctggcggcatgcttaacacatgcaagtcgaacggcagcacggtctagcttgctagatgggtggcgagtggcgaacgggtgagtaacgcgtaggaatatgccttaaagtttgggataacatggggaaactcatgctaataccggatgagctcttaggaggaaagctggggacctgcaagggcctggcgctttaagattagcctgcgtccgattagctagttggtggggtaagggcctaccaaggcgacgatcggtagctggtctgagaggatggccagccacactgggactgagacacggcccagactcctacgggaggcagcagtggggaatattggacaatggggggaaccctgatccagcaatgccgcgtgtgtgaagaaggcctgagggttgtaaagcactttcagtggggaggaggattgattggttaagagctgattaattggacgttacccacaga

SEQ ID NO: 7033 - DNA, 352 bp, unidentified
  misc_feature 1..352: note = Ascusbbf_1500877, encodes 16S rRNA
  source 1..352: mol_type = genomic DNA
agagtttgatcctggctcaggacgaacgctggcggcgtgcttcatacatgcaagtcgaacgataaggtctcttcggagacacataagtggcggacgggtgagtaatgtgtagagaatctgccttagagtgggggacaacagttggaaacgactgctaataccgcatatgcgcgtacctgtgatggtattcgtgaaaactccggtgctctaagatgagtctgcatctgattagctagttgggggtgtaatggaccaccaaggcgacgatcagtagctggtttgagaggatgatcagccacaatgggactgagacacggcccatactcctacgggagccagcagccgcggtaat

SEQ ID NO: 7034 - DNA, 490 bp, unidentified
  misc_feature 1..490: note = Ascusbbf_130363, encodes 16S rRNA
  source 1..490: mol_type = genomic DNA
agagtttgatcctggctcaggatgaacgctggcggcgtgcttaacacatgcaagtcgaacggttaaagcccacttcggtgggtgcataaagtggcgaacgggtgagtaacacgtgaccaacccgccccccgcaccgggataaccggcggaaacgcccgctaataccggatactccgcgacggccgcatggccgacgcgggaaagcccaggcggcgggggatggggtcgcggcccatcagctagacggcggggtgacggcccaccgtggcgactacgggtagccgggttgagagaccgaccggccacattgggactgagacacggcccagactcctacgggaggcagcagtggggaatattgcgcaatgggggaaaccctgacgcagcaacgccgcgtgcgggacgaaggccttcgggtcgtaaaccgctttcatcggggaagacgtcgactgtacccgaagaagaagccccggctaaatacgtgccagca

SEQ ID NO: 7035 - DNA, 490 bp, unidentified
  misc_feature 1..490: note = Ascusbbf_75878, encodes 16S rRNA
  source 1..490: mol_type = genomic DNA
agagtttgatcctggctcaggatgaacgctggcggcgtgcttaacacatgcaagtcgaacggttaaaccggcttcggccggacatacagtggcgaacgggtgagtaacacgtgaccaacctgccccgcgctccgggacagccccccgaaagggggattaataccgggtactccgggaggggcgcatgccccgcccgggaaagcccaggcggcgcgggatggggtcgcggcccatcaggtagtaggcggggtagaggcccgcctagccgacgacgggtagccgggttgagagaccgaccggccacattgggactgagatacggcccagactcctacgggaggcagcagtggggaatattgcgcaatggggggaaccctgacgcagcaacgccgcgtgcgggatgacggccctcgggttgtaaaccgctttcagcagggaagacatcgactgtacctgcagaagaagccccggctaactacgtgccagcagc

SEQ ID NO: 7036 - DNA, 490 bp, unidentified
  misc_feature 1..490: note = Ascusbbf_194500, encodes 16S rRNA
  source 1..490: mol_type = genomic DNA
agagtttgatcatggctcaggacgaacgctggcggcgtgcctaatacatgcaagtcgagcgctggatggtttccttcggggaattatccggagcggcggacgggtgagtaacacgtaggcaacctgcccggaagaccgggataactaccggaaacggtagctaataccggataggtggcttcttcgcatgggggagccaagaaacgcggagcaatctgcggcttacggatgggcctgcggcgcattagctagttggcagggtaacggcctaccaaggcgacgatgcgtagccgacctgagagggtgatcggccacactgggactgagacacggcccagactcctacgggaggcagcagtagggaatcttccgcaatgggcgaaagcctgacggagcaacgccgcgtgagtgaggaaggtcttcggatcgtaaagctctgttgccaaggaagaacggcccggagagtcactgctccgggagtgacggtact

SEQ ID NO: 7037 - DNA, 490 bp, unidentified
  misc_feature 1..490: note = Ascusbbf_197051, encodes 16S rRNA
  source 1..490: mol_type = genomic DNA
agagtttgatcctggctcagaatgaacgctggcggcatggattaggcatgcaagtcgaacgggacaccctcgggtgtctagtggcgaaagggtgagtaacacgtgagcaacctgcccccgagtctggaataagcgatggaaacgtcgtctaataccggatgaggactggggtctcctgactccaactccaaagatttatcgcttggggatgggctcgcgtcccattagctagttggcggggtaatggcccaccaaggctgtgacgggtaggtggactgagaggttggtcacccacactgggactgagacactgcccagactcctacgggaggctgcagtcgagaatcttccgcaatgggcgcaagcctgacggagcgatgccgcgtgagggaagaaggccttcgggttgtaaacctctgtcacccgggacgaaaacaatgacggtaccgggagaggaagtcacggctaactacgtgccagcagccgcggt

SEQ ID NO: 7038 - DNA, 490 bp, unidentified
  misc_feature 1..490: note = Ascusbbf_259915, encodes 16S rRNA
  source 1..490: mol_type = genomic DNA
agagtttgatcctggctcaggataaacgctggcggcgcacataagacatgcaagtcgaacggaagtcgttgtaatgatgttgacatgaacagagaacttgttcaaagggaatgaagattgacttacaacaatggctttagtggcggactggtgagtaacacgtaagcaacctgcctatcagaggggaataacagcgagaaatcgttgctaataccgcatatgccatataaaccacatggtttaagtgggaaaggagaaatccgctgatagatgggcttgcgtctgattagctagttggtgaggtaacggcttaccaaggcaacgatcagtagccggactgagaggttcaacggccacattgggactgagatacggcccagactcctacgggaggcagcagtcgggaatattgcgcaatggaggaaactctgacgcagtgacgccgcgtataggaagaaggttttcggattgtaaactattgtcgatgggg

SEQ ID NO: 7039 - DNA, 490 bp, unidentified
  misc_feature 1..490: note = Ascusbbf_37879, encodes 16S rRNA
  source 1..490: mol_type = genomic DNA
agagtttgatcctggctcaggatgaacgctggcggcgtgcttaacacatgcaagtcgaacgaagcattaaggatgaagttttcggatggatttctttttgacttagtggcggacgggtgagtaacgcgtggggaacctgccgtatgcagggggacaacagttggaaacgactgctaataccgcataagcgcacggaaccgcatggttctgtgtgaaaagatttatcggcatacgatggccccgcgttggattaggtagttggtgaggtaacggcccaccaagccgacgatccatagccgacctgagagggtgaccggccacattgggactgagacacggcccaaactcctacgggaggcagcagtggggaatattgcacaatgggggaaaccctgatgcagcgacgccgcgtgagtgaggaagtatttcggtatgtaaagctctatcagcagggaagaagatgacggtacctgcataagaagccccggct

SEQ ID NO: 7040 - DNA, 490 bp, unidentified
  misc_feature 1..490: note = Ascusbbf_16312, encodes 16S rRNA
  source 1..490: mol_type = genomic DNA
agagtttgatcatggctcaggatgaacgctggcggcgtgcttaacacatgcaagtcgaacggagatgtttacgacagagacttcggtcaaagaagtttgcatcttagtggcggacgggtgagtaacgcgtgggcaacctgccgtatgcagggggacaacagttggaaacgactgctaataccgcataagcgcacagtaccgcatggtacagtgtgaaaagatttatcggcatacgatgggcccgcgttggattaggtagttggcggagtaacggcccaccaagcctacgatccatagccgacctgagagggtgatcggccacattgggactgagacacggcccaaactcctacgggaggcagcagtggggaatattgcacaatgggggaaaccctgatgcagcgacgccgcgtgagtgaagaagtatttcggtatgtaaagctctatcagcagggaagaaaatgacggtacctgactaagaagccccggc

SEQ ID NO: 7041 - DNA, 490 bp, unidentified
  misc_feature 1..490: note = Ascusbbf_69415, encodes 16S rRNA
  source 1..490: mol_type = genomic DNA
agagtttgatcatggctcaggatgaacgctggcggcgtgcataacacattcaagtcgaacggacttaggggcttcggtcccgaaagttagtggcggacgggtgagtaacgcgtgagcaacctgcctccggaagagggataacagttggaaacgactgctaataccgcataacaccaaaccaccgcatgatggtctggtcaaaggagcaatccgaccggagatgggctcgcgtccgattagatagttggtgaggtaacggctcaccaagtcgacgatcggtagccggactgagaggttgaacggccacattggaactgagatacggtccagactcctacgggaggcagcagtggggaatattgggcaatgggcgcaagcctgacccagcgacgccgcgtgaaggaagaagatcttcggattgtaaactttagttatcagggaagaaaaaaatgacggtacctgaagagaaagccacggctaactacgtgcc

SEQ ID NO: 7042 - DNA, 490 bp, unidentified
  misc_feature 1..490: note = Ascusbbf_246777, encodes 16S rRNA
  source 1..490: mol_type = genomic DNA
agagtttgatcctggctcaggacgaacgctggcggcgtgcctaatacatgcaagtcgagcggaccgatgggagcttgctcccttaggtcagcggcggacgggtgagtaacacgtgggtaacctgcctgtaagactgggataactccgggaaaccggggctaataccggatgcttgattgaaccgcatggttcaatcataaaaggtggcttttagctaccacttacagatggacccgcggcgcattagctagttggtgaggtaacggctcaccaaggcgacgatgcgtagccgacctgagagggtgatcggccacactgggactgagacacggcccagactcctacgggaggcagcagtagggaatcttccgcaatggacgaaagtctgacggagcaacgccgcgtgagtgatgaaggttttcggatcgtaaaactctgttgttagggaagaacaagtaccgttcgaatagggcggtaccttgacggtacc

SEQ ID NO: 7043 - DNA, 483 bp, unidentified
  misc_feature 1..483: note = Ascusbbf_46626, encodes 16S rRNA
  source 1..483: mol_type = genomic DNA
agagtttgatcatggctcaggattaacgctggcggcatgcctaatacatgcaagtcgaatgagaagcttgcttctcatggcgaacgggtgagtaacacgtaggtaacctgccttacactcgaggataaccgttggaaacgacggataatactggataggacaaagattcgcatgaatcgttgtttaaaagcaatggtgtatgaggggcctgcggtgcattagctagttggtgaggtaacggctcaccaaggcgatgatgcatagctggactgagaggttgaacagccacaatgggactgagaacggcccatactcctacgggaggcagcagtagggaattttcggcaatgggggaaaccctgaccgagcaatgccgcgtgaacgatgaagtatttcggtatgtaaagttcttttattaggaaagatagtgacggtacctaatgaataagctccggctaactacgtgccagcagccgcggtaat

SEQ ID NO: 7044 - DNA, 490 bp, unidentified
  misc_feature 1..490: note = Ascusbbf_158517, encodes 16S rRNA
  source 1..490: mol_type = genomic DNA
agagtttgatcctggctcaggatgaacgctagcggcaggcttaacacatgcaagtcgaggggcagcgcggttgtagtaatacaattggcggcgaccggcgcaagggtgcgtaacgcgtgagcgacatgcccgtaaccgggggataaccgatggaaacgtcgcctaaccccccataacactggaggttgcatgattttcagttgaaaactttggtggttacggattggctcgcgtgacattaggtagacggcggggtaacggcccaccgtgccgacgatgtctaggggttctgagaggaaggtcccccacaatggaactgagacacggtccatactcctacgggaggcagcagtgaggaatattggtcaatgggcggaagcctgaaccagccatgccgcgtgcgggaagacggccctatgggttgtaaaccgcttttgagagggagcaataaggtggtcgtgcaccatcgatgagagtacctttcgaataa

SEQ ID NO: 7045 - DNA, 490 bp, unidentified
  misc_feature 1..490: note = Ascusbbf_6288, encodes 16S rRNA
  source 1..490: mol_type = genomic DNA
agagtttgatcatggctcaggatgaacgctagcggcaggcttaacacatgcaagtcgaggggcagcgcgagtagcaatacttggcggcgaccggcgaaagggtgagtaacgcgtgagcaacatgcccggtactggaggatagtcgatggaaacgtcgcgtaatactccgtaacaacagtcttcgcatggggattgtttaagagatttatcgataccggattggctcgcgttccattagctagttggcggggtaacggcccaccaaggcgacgatggataggggttctgagaggaaggtcccccacattggaactgagacacggtccagactcctacgggaggcagcagtgaggaatattggtcaatggccgagaggctgaaccagccatgccgcgtgcgggaggacggccctatgggttgtaaaccgcttttttgtgggagcaataagtcttacgtgtaggacgatgagagtaccatgagaataagcatc

SEQ ID NO: 7046 - DNA, 490 bp, unidentified
  misc_feature 1..490: note = Ascusbbf_46350, encodes 16S rRNA
  source 1..490: mol_type = genomic DNA
agagtttgatcatggctcaggatgaacgctggcggcgtgcataacacattcaagtcgaacgaagcattagaacggaagccttcgggcggaagatttaatgacttagtggcggacgggtgagtaacgcgtgagcaacctgcctgcttgtgagggataacacagggaaacttgtgctaataccgcatgacgcatagggatcgcatggtttttatgccaaagatttattgcaagcagatgggctcgcgtctgattagatagttggcagggtaacggcctaccaagtcgacgatcagtagccggactgagaggttgaacggccacattggaactgagagacggtccagactcctacgggaggcagcagtggggaatattgggcaatgggcgaaagcctgacccagcgacgccgcgtgagggaagaaggtcttcggattgtaaacctctttcagcaaggaagaagaaagtgacggtacttgcagaagaagccacg

SEQ ID NO: 7047 - DNA, 490 bp, unidentified
  misc_feature 1..490: note = Ascusbbf_1377645, encodes 16S rRNA
  source 1..490: mol_type = genomic DNA
agagtttgatcctggctcaggatgaacgctagcggcaggcttaacacatgcaagtcgaggggcagcgcggggtagcaatactctggcggcgaccggcggaagggtgcgtaacgcgtgagcaacttgcccgtcactgggggataggcactggaaacggtgtgtaatactccataacatatggattcacatggatttatatttaaagattcgttggtgtcggatggtctcacgtaacattagctagtcggcggggtaacggcccaccgaggctacgatgtttaggggttctgagaggaaggtccacaacacggaaactgagaaacgggccagactcctacgggaggcagaagtgaggaatattggtcaatgggcggaagcctgaaccagccatgccgcgtgcaggaagaaggccctatgggtcgtaaactgcttttcctggagggcagtaagggtcacgagtggcccgatgagagtatcaggggaataagca

SEQ ID NO: 7048 - DNA, 490 bp, unidentified
  misc_feature 1..490: note = Ascusbbf_230598, encodes 16S rRNA
  source 1..490: mol_type = genomic DNA
agagtttgatcctggctcagattgaacgctggcggcaggcttaacacatgcaagtcgagcggtaacaggagaagcttgcttctcgctgacgagcggcggacgggtgagtaatacttaggaatctacctagtagtgggggatagctcggggaaactcgaattaataccgcatacgacctacgggagaaagggggcaacttgttgctctcgctattagatgagcctaagtcggattagctagatggtggggtaaaggcctaccatggcgacgatctgtagctggtctgagaggatgatcagccacaccgggactgagacacggcccggactcctacgggaggcagcagtggggaatattggacaatgggggcaaccctgatccagccatgccgcgtgtgtgaagaaggccttttggttgtaaagcactttaagcagtgaagaagactccatggttaatacccatggacgatgacattagctgcagaataagc

SEQ ID NO: 7049 - DNA, 490 bp, unidentified
  misc_feature 1..490: note = Ascusbbf_195889, encodes 16S rRNA
  source 1..490: mol_type = genomic DNA
agagtttgatcatggctcaggatgaacgctggcggcgtgcttaatacatgcaagtcgaacgaagcacctgcgacggatccccttcgggggagaagatgcttgtgacttagtggcggacgggtgagtaacgcgtgggtaacctgccttatgcagggggataacagttagaaatgactgctaataccgcataagcgcacggggccgcatggccgtgtgtgaaaagatttatcggcataagatggacccgcgtctgattaggtagttggtgaggtaacggcccaccaagcctgcgatcagtagccgacttgagagagtgatcggccacattgggactgagacacggcccagactcctacgggaggcagcagtagggaatattgcacaatgggggaaaccctgatgcagcgacgccgcgtgagtgaagaagtatttcggtacgtaaagctctatcagcagggaagataatgacggtacctgactaagaagcccc

SEQ ID NO: 7050 - DNA, 490 bp, unidentified
  misc_feature 1..490: note = Ascusbbf_5114, encodes 16S rRNA
  source 1..490: mol_type = genomic DNA
agagtttgatcatggctcaggatgaacgctagcggcaggcttaacacatgcaagtcgaggggtaacagggcgtagcaatacgccgctgacgaccggcgcacgggtgcgtaacgcgtatacaacctacctgtaacagggggataacggagtgaaaactccactaataccccatattgacgagtcttcgcatgggggttcgtcgaaagcttcggtggttacggatgggtatgcgtgacattaggtagttggcggggcaacggcccaccaagccgacgatgtctaggggagctgagaggctagtcccccacactggtactgagacacggaccagactcctacgggaggcagcagtgaggaatattggtcaatggacggaggtctgaaccagccatgccgcgtgagggaagaaggtcctatgggttgtaaacctcttttgctccggagcaataaggcggatgcgtccgccgacgagagtacggggcgaataagc

SEQ ID NO: 7051 - DNA, 490 bp, unidentified
  misc_feature 1..490: note = Ascusbbf_157043, encodes 16S rRNA
  source 1..490: mol_type = genomic DNA
agagtttgatcctggctcagaacgaacgctggcggtatgctttaaccatgcaagtcgaacgagaaagggtagcaatacccgagtaaagtggcaaacgggtgagtaacacacaggaatctacccagtagagaggaataagcgctggaaacggcgtctaataccacatactacgattttagaaatatcttcggaaagggttggtagcaatatcaattcgctattggatgagcctatgtcggattagctagttggtggggtaatggcctaccaaggcgatgatccgtagctgatctgagagggtgatcagccacactggaactgcgacacggtccagactcctacgggaggcagcaggtgggaatattggacaatgggcgaaagcctgatccagcaataccgcgtgaatgatgaaggccttcgggttgtaaagttcttttaatagggaagataatgacggtacctatagaataagcaccggcaaacttcgtgc

SEQ ID NO: 7052 - DNA, 490 bp, unidentified
  misc_feature 1..490: note = Ascusbbf_74466, encodes 16S rRNA
  source 1..490: mol_type = genomic DNA
agagtttgatcatggctcaggatgaacgctagctacaggcttaacacatgcaagtcgaggggcagcatgaacttagcttgctaagtttgatggcgaccggcgcacgggtgagtaacacgtatccaacctgcccatgactcagggatagccctctgaaaggaggattaatacctgatgcggttgacgggggacatcccctttcaaccaaagattcatcggtcatggatggggatgcgtctgattaggcagtcggcggggtaacggcccaccgagccatcgatcagtaggggttctgagaggaaggtcccccacataggaactgagacacggtcctaactcctacgggaggcagcagtgaggaatattggtcaatggtcgagagactgaaccagccaagtagcgtgaaggatgactgccctatgggttgtaaacttcttttatgagggaataaagtgtgccacgcgtggcattttgcatgtacctcatgaat

SEQ ID NO: 7053 - DNA, 361 bp, unidentified
  misc_feature 1..361: note = Ascusbbf_460740, encodes 16S rRNA
  source 1..361: mol_type = genomic DNA
agagtttgatcctggctcaggatgaacgctggcggcgtgcctaatacatgcaagtcgaacgagcgagatccagcttgctggatttagcgagtggcgaacgggtgagtaatacgtaagcaacctgcctacacggactgggataacacctggaaacgggcgctaataccggataggtaacgagagggcatcctcttgttattaaaggtttgaaacacaagtagatgggcttacggtgcattagctagttggtgaggtaacggcccaccaaggcgatgatgcatagccggcctgagagggtgaacggccacattgggactgagacacggcccagactcctacgggagccagcagccgcggtaat

SEQ ID NO: 7054 - DNA, 490 bp, unidentified
  misc_feature 1..490: note = Ascusbbf_213036, encodes 16S rRNA
  source 1..490: mol_type = genomic DNA
agagtttgatcctggctcaggatgaacgctagcggcaggcttaacacatgcaagtcgaggggcagcgcggggtagcaatactctggcggcgaccggcggaagggtgcgtaacgcgtgagcaacatacccgtatcagggggataggagatggaaacgtcttataataccccataacaacagaagttgcatgacttttgtttgaaagattcattggatacggattggctcgcgtgacattagctagtcggcggggtaacggcccaccgaggcgacgatgtctaggggaactgagaggttggtcccccacactggaactgagacacggtccagactcctacgggaggcagcagtgaggaatattggtcaatgggcggaagcctgaaccagccatgccgcgtgcaggactaaggccctatgggtcgtaaactgcttttgacggggagcaataagggtgtcgtgacatccgatgagagtactcgtcgaataagca

SEQ ID NO: 7055 - DNA, 490 bp, unidentified
  misc_feature 1..490: note = Ascusbbf_195474, encodes 16S rRNA
  source 1..490: mol_type = genomic DNA
agagtttgatcatggctcaggatgaacgctggcggcgtgcctaacacatgcaagtcgaacgaggtatatcggaatgagattcgtcgaaggaaggtataccgagtggcggatgggtgagtaacgcgtggagaacctgccctatgcagggggataacagctggaaacggctgacaataccgcataagcgcacgatgccgcatggcatagagcgaaaagatttatcggcataggatggctccgcgtcggattagccagttggcggggtaacggcccaccaaagcgacgatccgtagccggcctgagagggcgaccggccacattgggactgagacacggcccagactcctacgggaggcagcagtgggggatattgcacaatgggcgcaagcctgatgcagcgacgccgcgtggaggatgaagtatttcggtatgtaaactcctttcggcagggaagaaaacgacggtacctgcagaagaagccccggctaac

SEQ ID NO: 7056 - DNA, 490 bp, unidentified
  misc_feature 1..490: note = Ascusbbf_1445381, encodes 16S rRNA
  source 1..490: mol_type = genomic DNA
agagtttgatcctggctcaggatgaacgctagcggcaggcttaacacatgcaagtcgaggggtaacacggggtagcaatactctggcgacgaccggcgcacgggtgcgtaacgcgtatgcaacctacctgtaacaggggtataacggagagaaatttccactaatcccccatattgttagagattcgcatgtttctctaacgaaagcttcggtggttacggatgggcatgcgtgccgttagctagttggtaaggtaacggctaaccaagaaaacgggggctaggggggctgagaggcttatcccccacactggaactgagaaacggaccagactcctacgggaggaagcagtgaggaatattggtcaatggacggaagtctgaaccagccatgccgcgtggaggaagaaggtcctatgggttgtaaactccttttgttcgagagtaataagaggcttgcgagcctcgatgagagtatcggacgaataagc

SEQ ID NO: 7057 - DNA, 490 bp, unidentified
  misc_feature 1..490: note = Ascusbbf_633691, encodes 16S rRNA
  source 1..490: mol_type = genomic DNA
agagtttgatcctggctcaggatgaacgctggcggcgtgcttaacacatgcaagtcgaacgaagatatcctgaatgagagcttcggcaggaattctggatattcttagtggcggacgggtgagtaacgtgtgggcaacctgccctatactggggaataatcactggaaacggtgactaataccgcatgtggttccttgaaggcatctttagggaaagaaaggatttattcggtataggatgggcccgcatctgattagctagttggtgagataaaagcccaccaaggcgacgatcagtagccgacctgagagggtgatcggccacattgggactgagacacggcccaaactcctacgggaggcagcagtggggaatattgcacaatgggcgaaagcctgatgcagcaacgccgcgtgaaggaagaagggtttcggctcgtaaacttctatcaatagggacgaaacaaatgacggtacttaaataagaagc

SEQ ID NO: 7058 - DNA, 490 bp, unidentified
  misc_feature 1..490: note = Ascusbbf_100797, encodes 16S rRNA
  source 1..490: mol_type = genomic DNA
agagtttgatcatggctcaggacgaacgctggcggcacgcttaacacatgcaagtcgaacggagtttaaagagcttgctttttaaacttagtggcggacgggtgagtaacacgtgagcaacctgccttcaagcgaggaataatggctggaaacgaccactaatacctcataacatagcgagaccgcatgatcttgctatcaaaggtttaccacttgaagatgggctcgcgtccgattagccagttggtgaggtaacggctcaccaaagcgacgatcggtagccgtactgagaggtagaacggccacattgggactgagacacggcccagactcctacgggaggcagcagtggggaatattgcacaatggaggaaactctgatgcagcgatgccgcgtgagggaagaaggctttcgggttgtaaacctctgttatcagggacgaaaatgacggtacctgaggaggaagctccggctaactacgtgccagca

SEQ ID NO: 7059 - DNA, 490 bp, unidentified
  misc_feature 1..490: note = Ascusbbf_166499, encodes 16S rRNA
  source 1..490: mol_type = genomic DNA
agagtttgatcatggctcaggatgaacgctagctacaggcttaacacatgcaagtcgaggggcatcgcggggaggcttcggccaccctggcggcgaccggcgaatgggtgagtaacacgtatccaacctgccccgtaccgggggatagccctccgaaaggagaattaataccccatgtctcggtccgcgacatcccggtccgaggaaaggttcgccggtacgggatggggatgcgcccgattagcttgttggcggggtaacggcccaccaaggcgtcgatcggtaggggttctgagaggaaggtcccccacactggaactgagacacggtccagactcctacgggaggcagcagtgaggaatattggtcaatgggcgggagcctgaaccagccaagtagcgtgaaggatgacggccctacgggttgtaaacttcttttgtgcgggagtaaagtgcgccacgtgtggcgttttgcacgtaccgcaagaaaa

SEQ ID NO: 7060 - DNA, 490 bp, unidentified
  misc_feature 1..490: note = Ascusbbf_96146, encodes 16S rRNA
  source 1..490: mol_type = genomic DNA
agagtttgatcctggctcaggatgaacgctggcggcgtgcctaacacatgcaagtcgagcgagaagctcatgatcaatacttcggttgcgtgaatgagtggaaagcggcggacgggtgagtaacgcgtaggcaacctgccccttgcagagggatagcctcgggaaaccgggattaaaacctcataacgcgtccacaagacatcttgaggacgccaaagatttatcggcaagggatgggcctgcgtctgattagttagttggtggggtaacggcctaccaaggcgacgatcagtagccgacctgagagggtgatcggccacattggaactgagacacggtccaaactcctacgggaggcagcagtggggaatattgcacaatgggcgaaagcctgatgcagcaacgccgcgtgaaggaagaaggcccttgggtcgtaaacttctgttctaagggaagataatgacggtaccttaggagcaagtcccggcta

SEQ ID NO: 7061 - DNA, 490 bp, unidentified
  misc_feature 1..490: note = Ascusbbf_175703, encodes 16S rRNA
  source 1..490: mol_type = genomic DNA
agagtttgatcctggctcaggatgaacgctggcggcgtgcttaacacatgcaagtcgaacgagaaagcgcccccgggcgcgagtagagtggcgaacgggtgagtaacacgtgaggaacctgcccccctccccgggataacccagggaaacctgcgctaataccggatgccccgggccggccgcatggccggcccgggaaagcccaggcggagggggatggcctcgcggcccattaggcagtcggcggggtaacggcccaccgagccggcgatgggtagccgggttgagagaccgaccggccacattgggactgagacacggcccagactcctacgggaggcagcagtggggaattttgcgcaatgggggaaaccctgacgcagcaacgccgcgtgcgggacgaaggccctcgggttgtaaaccgctttcagcaggggagaaactgacggtacctgcagaagaagctccggctaactacgtgccagcagcc

SEQ ID NO: 7062 - DNA, 490 bp, unidentified
  misc_feature 1..490: note = Ascusbbf_1515, encodes 16S rRNA
  source 1..490: mol_type = genomic DNA
agagtttgatcatggctcaggatgaacgctagctacaggcttaacacatgcaagtcgagcggaacttcttcggaagtttagcggcagacgggtgagtaacacgtatccaacctttcccttactcgggtatagcctcgggaaactgagagtaatccccgatgaagtgtacgataagcattttttgcacaccaaagatttatcggtaaggggtggggatgcgttccattaggtagtaggcggggcaacggcccacctagccgatgatggataggggttctgagaggaaggtcccccacattggaactgcgacacggtccaaactcctacgggaggcagcagtgaggaatattggtcaatggtcggaagactgaaccagccaagtagcgtgcaggatgacggccctatgggttgtaaactgcttttgtgcgggaataacggtagccacgtgtggttgcgtgcatgtaccgtacgaataaggatcggctaactc

SEQ ID NO: 7063 - DNA, 490 bp, unidentified
  misc_feature 1..490: note = Ascusbbf_34647, encodes 16S rRNA
  source 1..490: mol_type = genomic DNA
agagtttgatcatggctcaggatgaacgctggcggcgtgcttaacacatgcaagtcgaacgaggaattgcgaaagaagttttcggatggattttgcttttccgagtggcggacgggtgagtaacgcgtgggtaacctgccttacactgggggacaacagagagaaatttctgctaataccgcataacccgctagggccgcatggcccggacggaaaagatttatcggtgtaagatggacccgcgtctgattagcttgttggtgaggtaacggcccaccaaggcgacgatcagtagccgaactgagaggttgaccggccacattgggactgagacacggcccagactcctacgggaggcagcagtggggaatattgcacaatggggggaaccctgatgcagcaacgccgcgtgagtgaggaagtatttcggtatgtaaagctctatcagcagggaagagattgacggtacctgcataagaagccccggcta

SEQ ID NO: 7064 - DNA, 490 bp, unidentified
  misc_feature 1..490: note = Ascusbbf_21296, encodes 16S rRNA
  source 1..490: mol_type = genomic DNA
agagtttgatcatggctcagaacgaacgctggcggcgcgtcttaagcatgcaagtcgagcggcagcagcaatgcgagagcggcggacgggtgagtaacacgtgggtaatctgccctccagtcggggatagcctgtggaaacacaggataataccggatgcgatggtctgacacaagttggattaggaaaggggccaaggccccgctggaggatgagcccgcgtcccattagctagatggcagggtaaaggcctaccatggcgatgatgggtagccggcctgagagggtgaacggccacattggaactgagacacggtccagactcctacgggaggcagcagctaagaatcttccacaatggacggaagtctgatggagcgacgccgcgtgcgcgatgaaggccgtgaggttgtaaagcgcttttcttgagggggaacaacacatccagggaatgggatgtggatgacgtgaatcgaggaataagccccgg

SEQ ID NO: 7065 - DNA, 490 bp, unidentified
  misc_feature 1..490: note = Ascusbbf_17756, encodes 16S rRNA
  source 1..490: mol_type = genomic DNA
agagtttgatcatggctcaggatgaacgctggcggcgtgcctaacacatgcaagtcgagcgagatactgttgaacagagattcgtcaacgggatacagtggaaagcggcggacgggtgagtaacgcgtaggcaacctgccccttacacagggatagccattggaaacgatgattaaaacctgatgacacctgaggatgacatcttcctgaggtcaaagatttatcggtaagggatgggcctgcgtctgattagatagttggtgaggtaacggcccaccaagtcaacgatcagtagccgacctgagagggtgatcggccacattggaactgagacacggtccaaactcctacgggaggcagcagtggggaatattgcacaatgggggaaaccctgatgcagcaacgccgcgtgaaggaagaaggtcttcggatcgtaaacttctgtcctagaggaagataatgacggtactcttggaggaagccccggcta

SEQ ID NO: 7066 - DNA, 490 bp, unidentified
  misc_feature 1..490: note = Ascusbbf_111573, encodes 16S rRNA
  source 1..490: mol_type = genomic DNA
agagtttgatcctggctcaggatgaacgctggcggcgtgcctaacacatgcaagtcgaacgaggtcttttatcttggagattcgtcaaagagatttctgaccgagtggcggatgggtgagtaacgcgtggagaacctgcccttatcagggggataacaactggaaacggttgacaataccgcatacgctcttatgatcgcatgatcgtgagaggaaagatttatcggataaggatggctccgcgtcggattagccagttggcggggtaacggcccaccaaagcgacgatccgtagccggcctgagagggcgaccggccacattgggactgagacacggcccagactcctacgggaggcagcagtgggggatattgcacaatggggggaaccctgatgcagcgacgccgcgtggaggaagaagtatttcggtatgtaaactcctatcagcagggaagaaaatgacggtacctgactaagaagccccggcta

SEQ ID NO: 7067 - DNA, 490 bp, unidentified
  misc_feature 1..490: note = Ascusbbf_623596, encodes 16S rRNA
  source 1..490: mol_type = genomic DNA
agagtttgatcatggctcaggatgaacgctggcggcgtgcctaacacatgcaagtcgaacggagatttggcgctgacgagtgaaatagcttgctatcgaacgagtcttgccaaagcttagtggcggacgggtgagtaacgcgtggacaacctggcccatacagagggacagcagctggaaacggctgataataccgcataagcgcacagtatcacatggtacagtgtgaaaagatttatcggtatgggatgggtccgcgtccgattagccagttggcggggtaacggcccaccaaagcgacgatcggtagccggcctgagagggcggacggccacattgggactgagacacggcccagactcctacgggaggcagcagtgggggatattgcacaatggggggaaccctgatgcagcgacgccgcgtgggtgaagaagtatttcggtacgtaaagccctatcagcagggaagaagaattgacggtacctga

SEQ ID NO: 7068 - DNA, 490 bp, unidentified
  misc_feature 1..490: note = Ascusbbf_16582, encodes 16S rRNA
  source 1..490: mol_type = genomic DNA
agagtttgatcatggctcaggacgaacgctggcggcatgcttaacacatgcaagtcgaacggagttaccctcttcggaggataacttagtggcgaacgggtgagtaacacgtgaataacctgccttgtacacacgaataacaagccgaaaggtttgctaatgcgcgataagatcgtagtttcgcatgaaacagcgaccaaagctccggcggtgcaagatggattcgcggcccattagctagttggtgaggtaacggcccaccaaggcgacgatgggtagccgacctgagagggtgatcggccacactggaactgagacacggtccagactcctacgggaggcagcagtggggaatattgggcaatgggcgcaagccttacccagcaatgccgcgtgagtgaagaaggtctttggattgtaaagctctttgattggggacgaaacaaacgacggtacccaaagaacaagccccggctaactacgtgccagc

SEQ ID NO: 7069 - DNA, 490 bp, unidentified
  misc_feature 1..490: note = Ascusbbf_1393362, encodes 16S rRNA
  source 1..490: mol_type = genomic DNA
agagtttgatcctggctcaggatgaacgctagcggcaggcttaacacatgcaagtcgaggggcagcgcgtgtagcaatacatggcggcgaccggcgaaagggtgagtaacgcgtgagcaacgtgcccgtatgtgggggatagtcattggaaacgatgcgtaataccccgtaacacatggaactgcatggttctatgttgaaagattcattgcatacggatcggctcgcgtgccattaggtagacggcggggtaacggcccaccgtgccgacgatggctaggggttctgagaggaaggtcccccacattggaactgagacacggtccagactcctacgggaggcagcagtgaggaatattggacaatggccggaaggctgatccagccatgccgcgtgcgggatgacggccctatgggttgtaaaccgcttttgcgagggagcaataaggtccacgtgtgggccgatgagagtacctcgcgaataagcatc

SEQ ID NO: 7070 - DNA, 490 bp, unidentified
  misc_feature 1..490: note = Ascusbbf_199751, encodes 16S rRNA
  source 1..490: mol_type = genomic DNA
agagtttgatcctggctcaggatgaacgctagctacaggcctaacacatgcaagtcgaggggtaacgactgggaaagcttgctttctcagggcgacgaccggcgcacgggtgagtaacgcgtatccaacctgcctggaaccaagggataacccgtagaaatgcggcctaataccttatgttgtccgaagaaggcatctgacttggacaaaagatccgtcggttccggatggggatgcgtctgattaggtagtaggcggggcaacggcccacctagccgacgatcagtaggggttctgagaggaaggtcccccacattggaactgagacacggtccaaactcctacgggaggcagcagtgaggaatattggtcaatgggcgcgagcctgaaccagccaagtagcgtgcgggaggaaggccctatgggttgtaaaccgcttttaccgggggataaagtgagcgacgtgtcgctcattgcaggtacccggcga

SEQ ID NO: 7071 - DNA, 490 bp, unidentified
  misc_feature 1..490: note = Ascusbbf_140336, encodes 16S rRNA
  source 1..490: mol_type = genomic DNA
agagtttgatcctggctcaggacgaacgctggcggcgtgcttaacacatgcaagtcgagcggtaaggctccttcgggagtacacgagcggcgaacgggtgagtaacacgtgagcaatctgcccatctcatcggaataaccattggaaacgatggctaatgccgaatacgaccaccgaaggcatcttctggtggtggaaagctccggcggagatggatgagctcgcggcctatcagcttgttggtgaggtaacggctcaccaaggcaacgacgggtagccggcctgagagggtgaccggccacactgggactgagacacggcccagactcctacgggaggcagcagtggggaatattggacaatgggcgaaagcctgatccagcaacgccgcgtgagggatgacggccttcgggttgtaaacctctttcagcggggacgaagcgaaagtgacggtacccgcagaagaaggaccggccaactacgtgccagc

SEQ ID NO: 7072 - DNA, 490 bp, unidentified
  misc_feature 1..490: note = Ascusbbf_188059, encodes 16S rRNA
  source 1..490: mol_type = genomic DNA
agagtttgatcctggctcaggatgaacgctagcggcaggcctaacacatgcaagtcgaggggtagagggtgcttgcatccttgagaccggcgcacgggtgcgtaacgcgtatgcaacctgccttccacaggggaatagcccagagaaatttggattaatgccccatggcacagcgagacggcatcgtcttgctgttaaagtaacaacggtggaagatgggcatgcgtcccattagctagttggtaaggtaacggcttaccaaggctatgatgggtaggggtcctgagagggagatcccccacactggtactgagacacggaccagactcctacgggaggcagcagtgaggaatattggtcaatggtcgcaagactgaaccagccatgccgcgtgcaggatgacggtcctatggattgtaaactgcttttgtacgggaagaaacactcctacgtgtaggggcttgacggtaccgtaagaataaggatcggc

SEQ ID NO: 7073 - DNA, 490 bp, unidentified
  misc_feature 1..490: note = Ascusbbf_88364, encodes 16S rRNA
  source 1..490: mol_type = genomic DNA
agagtttgatcatggctcaggatgaacgctggcggcatgcctaagacatgcaagtcgaacgaagtagcctaatgaagacctagtgcttgcacgaagtcagatttagatttctacttagtggcagacgggtgagtaacacgtgggtaacctacctcagagactgggataacggttagaaatgatcgctaataccggatgattcatagttagataactaattatgctaaaagaagcgtttgcttcactttgagatgggcttgcgttgtattagttagttggtggggtaatggcctaccaagacaacgatgcatatccgagctgagaggctgatcggacacactgggactgagacacggcccagactcctacgggagacagcagttaggaatattcgtcaatgggggaaaccctgaacgagcaatgccgcgtgagtgatgaaggtcttatagattgtaaaactctgttgtagagaaagaaaccttaagatagg

SEQ ID NO: 7074 - DNA, 490 bp, unidentified
  misc_feature 1..490: note = Ascusbbf_275657, encodes 16S rRNA
  source 1..490: mol_type = genomic DNA
agagtttgatcctggctcaggatgaacgctggcggcgtgcctaatacatgcaagtcgaacgagttctcgttgatgatcggtgcttgcaccgagattcaacatggaacgagtggcggacgggtgagtaacacgtgggtaacctgcccttaagtgggggataacatttggaaacagatgctaataccgcatagatccaagaaccgcatggttcttggctgaaagatggcgtaagctatcgcttttggatggacccgcggcgtattagctagttggtgaggtaatggctcaccaaggcgatgatacgtagccgaactgagaggttgatcggccacattgggactgagacacggcccaaactcctacgggaggcagcagtagggaatcttccacaatggacgcaagtctgatggagcaacgccgcgtgagtgaagaaggctttcgggtcgtaaaactctgttgttggagaagaatggtcggcagagtaactgtt

SEQ ID NO: 7075 - DNA, 490 bp, unidentified
  misc_feature 1..490: note = Ascusbbf_1314962, encodes 16S rRNA
  source 1..490: mol_type = genomic DNA
agagtttgatcctggctcaggatgaacgctggcggcgtgcctaatacatgcaagtcgaacgcacagcgaaaggtgcttgcacctttcaagtgagtggcgaacgggtgagtaacacgtggacaacctgcctcaaggctggggataacatttggaaacagatgctaataccgaatgaaacttagtgtcgcatgacacgaagttaaaaggcgctttggcgtcacctagagatggatccgcggtgcattagttagttggtggggtaaaggcctaccaagacaatgatgcatagccgagttgagagactgatcggccacattgggactgagacacggcccaaactcctacgggaggctgcagtagggaatcttccacaatgggcgaaagcctgatggagcaacgccgcgtgtgtgatgaaggctttcgggtcgtaaagcactgttgtatgggaagaacagctagaatagggaatgattttagtttgacggtacca

SEQ ID NO: 7076 - DNA, 487 bp, unidentified
  misc_feature 1..487: note = Ascusbbf_113369, encodes 16S rRNA
  source 1..487: mol_type = genomic DNA
agagtttgatcatggctcaggatgaacgctggcggcgtgcctaatacatgcaagtcgagcggtaacatggacttcggtctgatgacgagcggcggacgggtgagtaacgcgtaagaacataccccaaactgagggataactgctcgaaagagtagctaataccgcatatggccgtctttgacggttaaagcttcggcggtttgggaatggcttgcgtctgattagctagttggtaaggtaactgcttaccaaggcgacgatcggtagctggtttgagaggatgatcagccacactgggactgagacacggcccagactcctacgggaggcagcagtagggaattttccacaatgggggcaaccctgatggagcaacgccgcgtgctggatgaaggccttcgggtcgtaaacagcttttgtctgtgacgaatatgacggtagcagacgaataagggtcggctaactacgtgccagcagccgcggtaat

SEQ ID NO: 7077 - DNA, 490 bp, unidentified
  misc_feature 1..490: note = Ascusbbf_2065, encodes 16S rRNA
  source 1..490: mol_type = genomic DNA
agagtttgatcatggctcaggatgaacgctagctacaggcttaacacatgcaagtcgagcggaatgctttcgggcatttagcggcagacgggtgagtaacacgtatccaacctttcccttactcgggtatagcctcgggaaactgagagtaatccccgatgcagtgtacgaacagcattatttgcacactaaagattcatcggtaaggggtggggatgcgttccattaggtagtaggcggggcaacggcccacctagccgatgatggataggggttctgagaggaaggtcccccacattggaactgcgacacggtccaaactcctacgggaggcagcagtgaggaatattggtcaatggtcggaagactgaaccagccaagtagcgtgcaggatgacggccctatgggttgtaaactgcttttgtgcgggaataacgtgctccacgtgtggggcagtgcatgtaccgtacgaataaggatcggctaactc

SEQ ID NO: 7078 - DNA, 490 bp, unidentified
  misc_feature 1..490: note = Ascusbbf_16454, encodes 16S rRNA
  source 1..490: mol_type = genomic DNA
agagtttgatcatggctcaggatgaacgctagcggcaggcttaacacatgcaagtcgaggggcagcgggtgtagcaatacatgccggcgaccggcgaaagggtgagtaacgcgtgagcaacatgcccgatactgggggatagtcgatggaaacgtcgcgtaataccccgtaacacattctctcgcatggggggatgttgaaagattgattggtatcggattggctcgcgtgccattaggtagacggcggggtaacggcccaccgtgccgacgatggctaggggttctgagaggaaggtcccccacattggaactgagacacggtccagactcctacgggaggcagcagtgaggaatattggacaatggccggaaggctgatccagccatgccgcgtgcgggatgacggccctatgggttgtaaaccgcttttgcgggggagcaataagagcaacgtgttgctcgatgagagtaccctgcgaataagcatc

SEQ ID NO: 7079 - DNA, 490 bp, unidentified
  misc_feature 1..490: note = Ascusbbf_26179, encodes 16S rRNA
  source 1..490: mol_type = genomic DNA
agagtttgatcatggctcaggatgaacgctggcggcgtgcttaacacatgcaagtcgaacgaatttccttcgaacggagacttcggtcaaagggagattgaagtgagtggcggacgggtgagtaacgcgtgggtaacctgccttacaccgggggataacagagggaaacttctgctaataccgcataagaccacggagccgcatggttctgaggtaaaagttccggcgatgtaagatggacccgcgtctgattagccagttggcggggtaacggcccaccaaagcgacgatcagtagccgacctgagagggtgatcggccacattgggactgagacacggcccaaactcctacgggaggcagcagtggggaatattgggcaatgggcgcaagcctgacccagcgacgccgcgtgagtgaagaagtatttcggtatgtaaagctctttaagcagggaagataatgacggtacctgcagaataagcaccggc

SEQ ID NO: 7080 - DNA, 490 bp, unidentified
  misc_feature 1..490: note = Ascusbbf_553166, encodes 16S rRNA
  source 1..490: mol_type = genomic DNA
agatttgatcatggctcaggacgaacgctggcggtacgcctaacacatgcaagtcgaacgggtgtgtagaaagcttgctctttatttcactagtggcggacgggtgagtaacgcgtgagtaatctgccttgaagtgggggataacatttggaaacaagtgctaataccgcgtaatatacgttcttcgcatgaagtttgtatcatagtttttcgcttcaagatgagctcgcgtccgattagtttgttggcgaggtaaatgctcaccaagactgcgatcggtagccgggttgagagactgaacggccacattgggactgagacacggcccagactcctacgggaggcagcagtggggaatattgcacaatgggggaaactctgatgcagcaataccgcatgagggatgaaggctttagggttgtaaacctctgtccaaagggacgaattttgacggtacctttgaaggaagctccggctaactacgtgccag

SEQ ID NO: 7081 - DNA, 490 bp, unidentified
  misc_feature 1..490: note = Ascusbbf_10565, encodes 16S rRNA
  source 1..490: mol_type = genomic DNA
agagtttgatcatggctcaggattaacgctggcggcatgcctaatacatgcaagtcgaatggttagcttgctaaccatggcgaacgggtgagtaacacgtaggtaacctgtcttcaagacgaggataaccattggaaacgatggataatactggataggacaaatccccgcatgaggagatgtttaaaggagcaatccacttgatgaggggcctgcggtgcattagctagttggtgaggtaaaggcccaccaaggcgatgatgcatagccggactgagaggttgaacggccacaatggaactgagaacggtccatactcctacgggaggcagcagtagggaattttcggcaatgggcggaagcctgaccgagcaatgccgcgtgaacgatgaagtatttcggtatgtaaagttcttttatttgggaagaaaaaacaaattgacggtaccaaatgaataagctccggctaactacgtgccagcagccgcgg

SEQ ID NO: 7082 - DNA, 490 bp, unidentified
  misc_feature 1..490: note = Ascusbbf_106464, encodes 16S rRNA
  source 1..490: mol_type = genomic DNA
agagtttgatcctggctcaggatgaacgctggcggcatgcctaagacatgcaagtcgaacgagatggccttttgaaaacggagtacttgtacaaagttggaaagagattctccatctagtggcagacgggtgagtaatacataagtaatctacctcagagactgggataacgtttggaaacgaacgctaataccggatgattcttcttacacaagtaagaaagctaaaaggagcgtttgcttcactttgagatgagcttatggcgtattaactagttggtggggtaatggcctaccaaggtgacgatgcgtagccgaactgagaggttgatcggccacattgggactgagacacggcccaaactcctacgggaggcagcagttaggaatattcgtcaatgggggaaaccctgaacgagcaatgccgcgtgagtgatgacggtctttatgattgtaaaactctgttgtaaggaaagaaaccttgtcatagg

SEQ ID NO: 7083 - DNA, 490 bp, unidentified
  misc_feature 1..490: note = Ascusbbf_195215, encodes 16S rRNA
  source 1..490: mol_type = genomic DNA
agagtttgatcctggctcaggatgaacgctggcggcgtgcctaacacatgcaagtcgagcgagaagcttttcagtagatacttcggttgacacagagaagtggacagcggcggacgggtgagtaacgcgtgggcaacctgccccggactggaggatagccaagggaaactttgaataatactccatgatgcaaaagcaacacatgttgcaattgccaaagatttatcggtctgggatgggcccgcgtctgattagccagttggtgaggtagcggctcaccaaagcgacgatcggtagccggcctgagagggtgaacggccacattggaactgagacacggtccagactcctacgggaggcagcagtggggagtattgcacaatgggcggaagcctgatgcagcaacgccgcgtgaaggaggaaggttttcggatcgtaaacttctgtccctggggaagaagaaagtgacggtacccaaggaggaagcccc

SEQ ID NO: 7084 - DNA, 490 bp, unidentified
  misc_feature 1..490: note = Ascusbbf_4392, encodes 16S rRNA
  source 1..490: mol_type = genomic DNA
agagtttgatcatggctcaggattaacgctggcggcatgcctaatacatgcaagtcgaatgggtagcttgctatccatggcgaacgggtgagtaacacgtaggtaacctgtcttcaagtcgaggataacctttggaaacgaaggataatactggataggtcgttaaaaatcacatgattaaacgattaaagattattatgtcacttgatgaggggcctgcggcgcattagctagttggtgaggtaaaggcccaccaaggcgatgatgcgtagccggactgagaggttgaacggccacaatgggactgagaacggcccatactcctacgggaggcagcagtagggaattttcggcaatgggcgcaagcctgaccgagcaatgccgcgtgaaagaagaagtatttcggtatgtaaatttcttttatttgggacgaaaaaacaaattgacggtaccaaatgaataagctccggctaactacgtgccagcagcc

SEQ ID NO: 7085 - DNA, 490 bp, unidentified
  misc_feature 1..490: note = Ascusbbf_29982, encodes 16S rRNA
  source 1..490: mol_type = genomic DNA
agagtttgatcatggctcagaacgaacgctggcggcgcgtcttaagcatgcaagtcgaatggcaagattggtgcttgcaccgatcctagaatggcagactggtgagtaacacgtgggtgacataccctctggatggggacagctgttagaaatagcaggtaataccgaataagcttgtgcaggttagagtggcataaggaaaggtgctccggcaccaccagaggaatggctcgcggcccattagctagttggtgaggtaacggcccaccaaggcgatgatgggtatccggcctaagagggtaaacggacacattgggactgagatacggcccagactcctacgggaggcagcagctaagaatattccgcaatggacgaaagtctgacggagcgacgccgcgtggatgatgaaggccgaaaggttgtaaaatccttttgaactggacgaataagtgtggcagggaatggtcatatggtgacggtacagttt

SEQ ID NO: 7086 - DNA, 490 bp, unidentified
  misc_feature 1..490: note = Ascusbbf_221735, encodes 16S rRNA
  source 1..490: mol_type = genomic DNA
agagtttgatcatggctcaggataaacgctggcggcgtgcttaacacatgcaagtcgaacggagtacttctcccgagaccgaggaagcttgcttccaaagaatcatttgaagtacttagtggcggacgggtgagtaacgcgtgggtaacctgcctcacactgggggatagcagttggaaacgactgataataccgcataagcgcacagtatcgcatggtacagtgtgaaaaactccggtggtgtgagatggacccgcgtctgattagccagttggcggggtaacggcccaccaaagctacgatcagtagccggcctgagagggtgtacggccacattgggactgagacacggcccaaactcctacgggaggcagcagtggggaatattgcacaatgggggaaaccctgatgcagcgacgccgcgtgagtgatgaagtatttcggtatgtaaaactctatcagcagggaagataatgacggtacctgacta

SEQ ID NO: 7087 - DNA, 490 bp, unidentified
  misc_feature 1..490: note = Ascusbbf_11094, encodes 16S rRNA
  source 1..490: mol_type = genomic DNA
agagtttgatcatggctcaggatgaacgctggcggcgtgcttaacacatgcaagtcgaacgaagcactggttttgaagttttcggacggaaaagcctttgacttagtggcggacgggtgagtaacgcgtgggcaacctgccgtatgcagggggacaacagttggaaacgactgctaataccgcataagcgcacggggacgcatgttcctgtgtgaaaagccttgacggcatacgatgggcccgcgttggattaggtagttggtgaggtaacggcccaccaagccgacgatccatagccgacctgagagggtgaccggccacattgggactgagacacggcccaaactcctacgggaggcagcagtggggaatattgcacaatgggggaaaccctgatgcagcgacgccgcgtgagtgaagaagtatttcggtatgtaaagctctatcagcagggaagaaaatgacggtacctgcacaagaagccccggct

SEQ ID NO: 7088 - DNA, 490 bp, unidentified
  misc_feature 1..490: note = Ascusbbf_120257, encodes 16S rRNA
  source 1..490: mol_type = genomic DNA
agagtttgatcatggctcaggatgaacgctggcggcacgcttaacacatgcaagtcgaacgaggttatgaacttcggttaataacctagtggcggacgggtgcgtaacgcgtgggtaatctgcccttgacagggggataacgtatagaaatgtacgctaataccgcataagcccacgagaccgcatggtcttgagggaaaagggatactggtcaaggatgagcccgcgtctgattaggtagttggtgaggtaaaggcccaccaagcctgcgatcagtagccggtctgagaggatggacggccacattgggactgagacacggcccaaactcctacgggaggcagcagtggggaatattgcacaatgggggaaaccctgatgcagcgatgccgcgtgaaggacgaagtgtttcggcacgtaaacttctatcagcaaggaagaaatcagacagtacttgaataagcagccccggctaactacgtgccagcag

SEQ ID NO: 7089 - DNA, 490 bp, unidentified
  misc_feature 1..490: note = Ascusbbf_239485, encodes 16S rRNA
  source 1..490: mol_type = genomic DNA
agagtttgatcatggctcaggatgaacgctggcggcgtgcctaacacatgcaagtcgaacggagctaccgcgctgatgatggagatgcttgcattgacagaatcttgtggtagcttagtggcggacgggtgagtaacgtgtggataacctggtccatccagggggatagcagctggaaacggctggtaataccgcatgagcgcacactaccgcatggtagagtgtgaaaagatctatcgggatggaatggatccgcatctgattagccagttggcggggtagaagcccaccaaagcgacgatcagtagccggcctgagagggcggacggccacattgggactgagacacggcccagactcctacgggaggcagcagtgggggatattgcacaatggggggaaccctgatgcagcgacgccgcgtgggtgaagaagtatttcggtatgtaaagccctatcagcagggaagataatgacggtacctgagtaa

SEQ ID NO: 7090 - DNA, 490 bp, unidentified
  misc_feature 1..490: note = Ascusbbf_28185, encodes 16S rRNA
  source 1..490: mol_type = genomic DNA
agagtttgatcatggctcaggatgaacgctagcgacaggcctaacacatgcaagtcgaggggtaacagggagcttgctccgctgacgaccggcgcacgggtgagtaacgcgtatgcaacctgcccgcgggatcgggatagccccccgaaagggggattaacaccggatgcggctgtttgggggcatccccgtacagccaaatgcgaagctcgcggatgggcatgcgtccgattagctggttgggggggtaacggcccaccaaggcgacgatcggtaggggtcctgagagggaggtcccccacactggtactgagacacggaccagactcctacgggaggcagcagtgaggaatattggtcaatgggcgagagcctgaaccagccatgtcgcgtggaggaataaggatctatggttcgtaaactccttttgcgcggggataaagtggcggacttgtccgctattgcaggtaccgcgcgaataagcatcggc

SEQ ID NO: 7091 - DNA, 490 bp, unidentified
  misc_feature 1..490: note = Ascusbbf_77099, encodes 16S rRNA
  source 1..490: mol_type = genomic DNA
agagtttgatcatggctcaggatgaacgctagctacaggcttaacacatgcaagtcgaggggcagcgtgtacaggtgcttgcaccagtacgacggcgaccggcgcacgggtgagtaacgcgtatccaacctgccatatactcggggatagcccggtgaaaaccgaattaacacccgatgagattccttgcggacatccaactggaatcaaagtttcacggtatatgatggggatgcgtctgattagcttgttggcggggtaacggcccaccaaggcgacgatcagtaggggttctgagaggaaggtcccccacattggtactgagacacggaccaaactcctacgggaggcagcagtgaggaatattggtcaatgggcgagagcctgaaccagccaagtagcgtgcaggatgacggccctatgggttgtaaactgcttttgtaagggaacaaagtgcgggacgtgtcctgctttgcgtgtaccttacgaa

SEQ ID NO: 7092 - DNA, 490 bp, unidentified
  misc_feature 1..490: note = Ascusbbf_304165, encodes 16S rRNA
  source 1..490: mol_type = genomic DNA
agagtttgatcatggctcaggatgaacgctggcggcgtgcctaacacatgcaagtcgaacggggttatgacgctgaggagacttcggtcaaatcttgttgtaacttagtggcggacgggtgagtaacgcgtggataacctgccatacacagggggataacagttagaaatgactgctaataccgcataagcgcacgagagggcatccttttgtgtgaaaagcgcatacggtgtatgatgggtccgcgtccgattagccagttggcggggtaagagcccaccaaagcgacgatcggtagccggcctgagagggtgaacggccacattgggactgagagacggcccaaactcctacgggaggcagcagtgggggatattgcacaatggggggaaccctgatgcagcgacgccgcgtgagtgaagaagttattcgtaatgtaaagctctatcagcagggaagaagcagacggtacctgactaagaagcaccgg

SEQ ID NO: 7093 - DNA, 490 bp, unidentified
  misc_feature 1..490: note = Ascusbbf_5123, encodes 16S rRNA
  source 1..490: mol_type = genomic DNA
agagtttgatcatggctcaggacgaacgctggcggcgcgcctaacacatgcaagtcgaacggagagtgtgttttgaattcttcggaaggaaaaatacatttcttagtggcggacgggtgagtaacacgtgagcaacctgccttgcagagagggataacgattggaaacgatcgctaataccacatgatgtatggacatcgcatggtgaccatatcaaagatttatcgctgcaagatgggctcgcgtctgattagatagttggtgaggtaatggctcaccaagtcgacgatcagtagccggactgagaggttgaacggccacattgggactgagacacggcccagactcctacgggaggcagcagtgggggatattgcacaatgggggaaaccctgatgcagcgacgccgcgtgagggaagaaggttttcggattgtaaacctctgtctttggggacgataatgacggtacccaaggaggaagctccggct

SEQ ID NO: 7094 - DNA, 490 bp, unidentified
  misc_feature 1..490: note = Ascusbbf_705984, encodes 16S rRNA
  source 1..490: mol_type = genomic DNA
agagtttgatcatggctcaggatgaacgctagcgacaggcttaacacatgcaagtcgaggggcatcagggatgtagcaatacatttgctggcgaccggcgcacgggtgagtaacgcgtatgcaacctgcctatcagaggaggataacccggcgaaagtcggactaatactccataaaacaggggttccgcatgggactatttgttaaagattaatcgctgatagatgggcatgcgttccattagctggttggtgaggtaacggctcaccaaggcaacgatggataggggttctgagaggaaggtcccccacactggtactgagacacggaccagactcctacgggaggcagcagtgaggaatattggtcaatgggcgagagcctgaaccagccaagtcgcgtgaaggatgaaggatctatggtttgtaaacttcttttatacgggaataaagttcaggacgtgtcctgttttgtatgtaccgttatgaat

SEQ ID NO: 7095 - DNA, 490 bp, unidentified
  misc_feature 1..490: note = Ascusbbf_122456, encodes 16S rRNA
  source 1..490: mol_type = genomic DNA
agagtttgatcatggctcaggatgaacgctagcggcaggcctaatacatgcaagtcgaggggcagcgcagtgtagcaatacatgggcggcgaccggcaaacgggtgcggaacacgtacacaaccttccttttagtggagcatagcccagggaaacttggattaatactccgtaacataacgagatggcatcttcttgttattatagaagcaattcgctagaagacgggtgtgcggctgattagatagttggcggggtaacggcccaccaagtccacgatcagtaactggtgtgagagcacgaccagtcacacgggcactgagacacgggcccgactcctacgggaggcagcagtaaggaatattggtcaatggacgcaagtctgaaccagccatgccgcgtggaggatgaaggccctctgggttgtaaacttcttttataggggacgaaaaagggactttctagtccaactgacggtaccctaggaataa

SEQ ID NO: 7096 - DNA, 490 bp, unidentified
  misc_feature 1..490: note = Ascusbbf_15121, encodes 16S rRNA
  source 1..490: mol_type = genomic DNA
agagtttgatcatggctcaggatgaacgctagcgacaggcctaacacatgcaagtcgaggggtaacaggggagcttgctcccgctgacgaccggcgcacgggtgagtaacgcgtatggaacctgcccgcgacacggggataatccggcgaaagtcggtctaatacccgatgacgtcgtcatttcgcatgttatgacgattaaagattcatcggtcgcggatggtcatgcgtggcattaggtagtaggcggggtaacggcccacctagccgacgatgcctaggggttctgagaggaaggtcccccacactggtactgagacacggaccagactcctacgggaggcagcagtgaggaatattggtcaatggacgcaagtctgaaccagccaagtcgcgtgaaggaagactgccctatgggttgtaaacttcttttataggggaataaagtgggtctcgtgaggccttttgcatgtaccctatgaataagcat

SEQ ID NO: 7097 - DNA, 490 bp, unidentified
  misc_feature 1..490: note = Ascusbbf_2211, encodes 16S rRNA
  source 1..490: mol_type = genomic DNA
agagtttgatcatggctcaggatgaacgctagcggcaggcttaacacatgcaagtcgaggggcagcgtaaggatgtagcaatacaaccttgacggcgaccggcgcaagggtgcgtaacgcgtgagcaacttgcccgtatcaggggcataaccggtggaaacgccgactaattccccataacacaagataaggcatcttattttgttgaaatctttggaggatacggatgggctcgcgtgacattaggcagttggcggggtaacggcccaccaaaccgacgatgtctaggggaactgagaggttaatcccccacactggaactgagacacggtccagactcctacgggaggcagcagtgaggaatattggacaatggccggaaggctgatccagccatgccgcgtgcaggataaggtcctatggattgtaaactgcttttgtatgagagcaataaggattacgtgtaatccgatgagagtatcatacgaat

SEQ ID NO: 7098 - DNA, 490 bp, unidentified
  misc_feature 1..490: note = Ascusbbf_12407, encodes 16S rRNA
  source 1..490: mol_type = genomic DNA
agagtttgatcatggctcaggataaacgctggcggcgcacataagacatgcaagtcgaacgaacttaattttaatatttatattaaaaagcggttagtggcggactggtgagtaacgcgtaagcaatctacctattagaggggaataacagtgagaaatcattgctaataccgcatatgccataagtatcgcatgatactagtgggaaaggagcaatccgctaatagatgaacttgcgtctgattagctagttggtggggtaacagcctaccaaggcaacgatcagtagccggactgagaggttgaacggccacattgggactgagatacggcccagactcctacgggaggcagcagtcgggaatattgcgcaatggaggaaactctgacgcagtgacgccgcgtataggatgaaggttttcggattgtaaactattgtcgttagggaagataaaagacagtacctaaggaggaagctccggctaactac

SEQ ID NO: 7099 - DNA, 490 bp, unidentified
  misc_feature 1..490: note = Ascusbbf_8879, encodes 16S rRNA
  source 1..490: mol_type = genomic DNA
agagtttgatcatggctcaggatgaacgctagcggcaggcctaacacatgcaagtcgaggggcagcggggtgtagcaatacactgccggcgaccggcgcacgggtgcgtaacgcgtatgcaacctacccatgggagggggataacccggagaaatccggactaataccccgtaacacacacattcgcatggaagtgtgttgaaagatacgtcgtccatggacgggcatgcgtggcattaggtagttggcggggcaacggcccaccaagccatcgatgcctaggggagctgagaggctaatcccccacactggtactgagacacggaccagactcctacgggaggcagcagtgaggaatattggtcaatggagggaactctgaaccagccatgccgcgtgagggaggaaggccctatgggttgtaaacctcttttgcctgggggcaataagggcggtgcgccgtccgatgagagtaccaggcgaataagca

SEQ ID NO: 7100 - DNA, 490 bp, unidentified
  misc_feature 1..490: note = Ascusbbf_57918, encodes 16S rRNA
  source 1..490: mol_type = genomic DNA
agagtttgatcatggctcaggacgaacgctggcggcgtgcttaacacatgcaagtcgaacgatgatgctgaagtttactttggtggattagtggcgaacgggtgagtaacacgtgagcaacgtgcccagaactctggaataactctcggaaacgggggctaatactggataggtgccacggccgcatggtctgtggttggaaagatttatcggttctggatcggctcacggcctatcagcttgttggtggggtaatggcctaccaaggcgacgacgggtagccggcctgagagggtgaccggccacactgggactgagatacggcccagactcctacgggaggcagcagtggggaatattgcacaatgggcgcaagcctgatgcagcaacgccgcgtgagggatgacggccttcgggttgtaaacctcttttagtagggaagaagcgcaagtgacggtacctgcagaaaaagcaccggctaactacgtgc

SEQ ID NO: 7101 - DNA, 490 bp, unidentified
  misc_feature 1..490: note = Ascusbbf_44748, encodes 16S rRNA
  source 1..490: mol_type = genomic DNA
agagtttgatcatggctcagaacgaacgctggcggcgcgtcttaagcatgcaagtcgaacggcaagataagagcttgctcttatcctagagtggcggactggtgagtaacgcgtaggtgacgtacccttcagatggggatagccgctagaaatagcggataataccgaatacggtcccgtgtgtcagaggcacgggaggaaaggagcttcggctccgctgaaggaacggcctgcgtcctatcagctggttggcggggtaacggcccaccaaggcaatgacaggtatccggcctaagagggtgaacggacacattgggactgagatacggcccagactcctacgggaggcagcagctaagaatattccgcaatggacgaaagtctgacggagcgacgccgcgtggacgatgaaggccggaaggttgtaaagtccttttatatatgaggaataagccggggaggtaatgcctcggtggtgactgtagtatat

SEQ ID NO: 7102 - DNA, 490 bp, unidentified
  misc_feature 1..490: note = Ascusbbf_54250, encodes 16S rRNA
  source 1..490: mol_type = genomic DNA
agagtttgatcctggctcagattgaacgctggcggcatgcttaacacatgcaagtcgaacggtaacaggtcgagtgatcccttcggggtgatcttggcgctgacgagtggcgcacgggtgagtaatacatgggaatctgcctagtagtgggggataacccggggaaactcgggctaataccgcatacgctctacggaggaaagcgggggatcttcggacctcgtgctattagatgagcccatgtcggattagcttgttggtggggtaatggcctaccaaggcgacgatccgtagctggtctgagaggacgatcagccacactgggactgagacacggcccagactcctacgggaggcagcagtggggaatattggacaatgggcgcaagcctgatccagcaatgccgcgtgtgtgaagaaggcctgcgggttgtaaagcactttcagtggggaagaaaagcttggggctaataccctcgggttttgacgt

SEQ ID NO: 7103 - DNA, 490 bp, unidentified
  misc_feature 1..490: note = Ascusbbf_37910, encodes 16S rRNA
  source 1..490: mol_type = genomic DNA
agagtttgatcatggctcaggacgaacgctggcggcgtgcctaacacatgcaagtcgagcggagacttgggaaatgagagcttcggcaggaatagaacaagttttagcggcggacgggtgagtaacgcgtgagcaatctgtctcagacagggggataacgcagcgaaagttgcactaataccgcatgagaccacagtaccgcatggtacaggggtcaaaggagcaatccggtctgaggtgagctcgcgtcctattaggtagttggtgaggtaacggctcaccaagcctgcgataggtagccgacctgagagggtgatcggccacactggaactgagacacggtccagactcctacgggaggcagcagtgggaatattgggcaatgggcgaaagcctgacccagcaacgccgcgtgagtgaagaaggtcttcggattgtaaatctctgtcctaagagaagaggggaagacggtatcttaggaggaagcccc

SEQ ID NO: 7104 - DNA, 490 bp, unidentified
  misc_feature 1..490: note = Ascusbbf_38550, encodes 16S rRNA
  source 1..490: mol_type = genomic DNA
agagtttgatcatggctcagagttaacgctggcatcgtgcataacacatgcaagtcgaacgggacttacttgagtagcaatacttgagtaagtttagtggcagacgggtgagtaatacataaggaattcacctccgagtggggaataacagtccgaaaggattgctaataccccataacataattaagtggcatcacttgattatcaaagatttatcgcttggagagaatcttatggtctatcagctagttggtagtgtaacggactaccaaggcgacgacggatagccggcctgaaagggcgaccggccacaagggcactgagacacgggccctactcctacgggaggcagcagtggggaattttggacaatgggcgaaagcctgatccagcaacgatgcgtggaggatgaaggttctcggattgtaaactccttttaagggggacgaaaaaaatgacggtaccccttgaataagccacggctaactac

SEQ ID NO: 7105 - DNA, 490 bp, unidentified
  misc_feature 1..490: note = Ascusbbf_1497994, encodes 16S rRNA
  source 1..490: mol_type = genomic DNA
agagtttgatcatggctcagaacgaacgctggcggcgcgtcttaagcatgcaagtcgagcgtgattacctagcttgctaggtatgaaagcggcggactggtgagtaacgcgtgggtaacgtaccctgaggatggggatagctcctagaaataggagataataccgaatacgcttgatgttgtcagaggacatcaaggaaaggttcttttgaaccgcctgaggaacggcccgcgtactattagctggttggtgaggtaacggcccaccaaggcgacgatagttacccggcctgagagggtgaacgggcacattgggactgagatacggcccagactcctacggaggcagcagctaagaatattccgcaatgcacgaaagtgtgacggagcgacgccgcgtggacgatgaaggccggaaggttgtaaagtccttttagatatgaggaataagcagtgtgagagaaacgcactgtggtgactgtagtatcaga

SEQ ID NO: 7106 - DNA, 490 bp, unidentified
  misc_feature 1..490: note = Ascusbbf_124760, encodes 16S rRNA
  source 1..490: mol_type = genomic DNA
agagtttgatcctggctcaggacgaacgctggcggcgtgcttaacacatgcaagtcgaacggagcgaagcccttcggggcggagcttagtggcggacgggtgagtaacacgtgagcaacctgcccattacagggggatagcagctggaaacggctggtaataccgcataagaccacagaaccgcatggttgaggggtaaaaggagagatccggtaatggatgggctcgcgtcccattaggtagttggtgagataacagcccaccaagccaacgatgggtaaccgacttgagagagtgatcggtcacattggaactgagaaacggtccaaactcctacgggaggcagcagtggggaatattgggcaatgggggaaaccctgacccagcaacgccgcgtgagggaagaaggccttcgggttgtaaacctctgtcctcggggacgaagaaatgacggtacccggggaggaagccccggctaactacgtgccag

SEQ ID NO: 7107 - DNA, 490 bp, unidentified
  misc_feature 1..490: note = Ascusbbf_80361, encodes 16S rRNA
  source 1..490: mol_type = genomic DNA
agagtttgatcatggctcaggacgaacgctggcggcatgcttaatacatgcaagtcgaacgggatatcagagcttgctttgatatctagtggcgaacgggtgagtaacacgtgagcaacctgcccactacacagggataccagtccgaaaggattgctaataccggatgagatcacaggaccgcatggtctagtggtaaaagctcaggcggtagtggatgggctcgcggtacattagttagttggtgaggtaacggcccaccaagacgatgatgtatagccgacctgagagggtgatcggccacattgggactgagatacggcccagactcctacgggaggcagcagtaaggaatattgggcaatgggggcaaccctgacccagcaatgccgcgtgaaggaagaaggttttcggattgtaaacttcttttatataggacgaatgaatgacggtactatatgaataagccccggctaactacgtgccagca

SEQ ID NO: 7108 - DNA, 490 bp, unidentified
  misc_feature 1..490: note = Ascusbbf_325331, encodes 16S rRNA
  source 1..490: mol_type = genomic DNA
agagtttgatcatggctcaggatgaacgctagctacaggcttaacacatgcaagtcgagcggaatgccttcgggcatttagcggcagacgggtgagtaacacgtatccaacctttcccttactcgggtatagcctcgggaaactgagagtaatccccgatgcagtgtacgcaatgcatattatgcacactaaagatttatcggtaaggggtggggatgcgttccattaggtagtaggcggggtaacggcccacctagccgatgatggataggggttctgagaggaaggtcccccacattggaactgcgacacggtccaaactcctacgggaggcagcagtgaggaatattggtcaatggtcgaaggactgaaccagccaagtagcgtgcaggatgacggccctatgggttgtaaactgcttttgtgcgggaataacggtctccacgagtggagatgtgcatgtaccgtacgaataaggatcggctaactc

SEQ ID NO: 7109 - DNA, 490 bp, unidentified
  misc_feature 1..490: note = Ascusbbf_87070, encodes 16S rRNA
  source 1..490: mol_type = genomic DNA
agagtttgatcatggctcaggacgaacgctggcggcgtgcctaacacatgcaagtcgaacggagtacccttgattgaagcttcggcagattgataggaatacttagtggcggacgggtgagtaacacgtgagtaacctgcccttcagagggggataacataccgaaaggtatgctaataccgcataacgcatatcagtcgcatggcagatatgccaaagatttatcgctgaaggatggactcgcggccgattaggtagttggcggggtaacggcccaccaagccgacgatcggtagccggactgagaggttgaacggccacattgggactgagacacggcccagactcctacgggaggcagcagtgggggatattgcgcaatgggggaaaccctgacgcagcgacgccgcgtggaggaagaaggttttcggattgtaaactcctgtcaacagggacgagaaaggacggtacctgtggaggaagccacggc

SEQ ID NO: 7110 - DNA, 490 bp, unidentified
  misc_feature 1..490: note = Ascusbbf_80339, encodes 16S rRNA
  source 1..490: mol_type = genomic DNA
agagtttgatcatggctcaggatgaacgctggcggcatgcctaacacatgcaagtcgaacggagatagaaatatcttagtggcgaacgggtgagtaacacgtgagcaacctgccttgtacacagggataacagatggaaacatctgctaataccggataagaccacagaccggcatcggtcaggggtaaaagtgatttagcggtacaagatgggctcgcgtccaattagctagttggtgaggtaacggcccaccaaggcgacgattggtagccgacttgagagagtgatcggccacattggaactgagacacggtccaaactcctacgggaggcagcagtggggaatattgggcaatggaggaaactcttacccagcaatgccgcgtgagcgatgaaggtcaattgattgtaaagctctatgattagggacgaataaatgacggtacctaaagaaaagccccggctaactatgtgccagcagccgcggta

SEQ ID NO: 7111 - DNA, 490 bp, unidentified
  misc_feature 1..490: note = Ascusbbf_101931, encodes 16S rRNA
  source 1..490: mol_type = genomic DNA
agagtttgatcatggctcaggatgaacgctagcggcaggcttaacacatgcaagtcgaggggcagcgcgaggtagcaatactttggcggcgaccggcggaagggtgcgtaacgcgtgagcaacatgcccgtatgagggggatagtcattggaaacgatgcgtaataccccgtaacattggaggccgcatgaccaccaattgaaagatttatcgcatacggattggctcgcgtgacattagctagttggcggggtaacggcccaccaaggcgacgatgtctaggggaactgagaggttggtcccccacactggaactgagacacggtccagactcctacgggaggcagcagtgaggaatattggtcaatgggcggaagcctgaaccagccatgccgcgtgaaggaataaggccctatgggtcgtaaacttcttttgacggggagcaataagggcgtcgagcacgctcgatgagagtactcgtcgaataagc

SEQ ID NO: 7112 - DNA, 490 bp, unidentified
  misc_feature 1..490: note = Ascusbbf_406752, encodes 16S rRNA
  source 1..490: mol_type = genomic DNA
agagtttgatcctggctcaggatgaacgctggcggcgtgcttaatacatgcaagtcgaacgaagatatttcgctgatgcgattcgtcaaatcttgaaatatcttagtggcggacgggtgagtaacgcgtgggtaacctgccttacacagggggataacagttagaaatgactgctaataccgcataagcgcacggtatcgcatgatacagtgtgaaaagatttatcggtgtaagatggacccgcgtctgattagctagttggtgaggtaacggcccaccaaggcgacgatcagtagccggcctgagagggtgaacggccacattgggactgagacacggcccaaactcctacgggaggcagcagtagggaatattggacaatgggggcaaccctgatccagcgacgccgcgtgagtgaagaagtatttcggtacgtaaagctctatcagcagggaagaaaatgacggtacctgactaagaagcaccggct

SEQ ID NO: 7113 - DNA, 490 bp, unidentified
  misc_feature 1..490: note = Ascusbbf_77397, encodes 16S rRNA
  source 1..490: mol_type = genomic DNA
agagtttgatcatggctcaggatgaacgctagcgacaggcctaacacatgcaagtcgaggggtaacaggggagcttgctcccgctgacgaccggcgcacgggtgagtaacgcgtatgcaacctgcccacgggatcgggatagccccccgaaagggggattaacaccggatgaggcggacgaggggcatccctttgtccgtcaaatgcgaagctcgtggatgggcatgcgtccgattagctagttggcggggtaacggcccaccaaggcgacgatcggtaggggttctgagaggaaggtcccccacactggtactgagacacggaccagactcctacgggaggcagcagtgaggaatattggtcaatgggcgagagcctgaaccagccatgtcgcgtgcaggaatacggccctatgggttttaaactgcttttgccgggggataaagtggcggactagtccgctattgcaggtacccggcgaataaggatc

SEQ ID NO: 7114 - DNA, 490 bp, unidentified
  misc_feature 1..490: note = Ascusbbf_105832, encodes 16S rRNA
  source 1..490: mol_type = genomic DNA
agagtttgatcatggctcaggacgaacgctggcggcacgcttaacacatgcaagtcgaacggagataaaggagcttgcttctttatcttagtggcggacgggtgagtaacacgtgagcaacctaccttcaagcggggaataatggagggaaacttccactaataccccataagatagtatttccgcatggagaagctatcaaagatttattgtttgaagatgggctcgcgtccgattagccagttggtgaggtaacggcccaccaaagcgacgatcggtagccgtactgagaggtagaacggccacattgggactgagacacggcccagactcctacgggaggcagcagtggggaatattgcacaatggaggaaactctgatgcagcgatgccgcgtgagggaagaaggttttcggattgtaaacctctgtagtacgggacgaaaaaaatgacggtaccgtacaagaaagctccggctaactacgtgcca

SEQ ID NO: 7115 - DNA, 490 bp, unidentified
  misc_feature 1..490: note = Ascusbbf_224149, encodes 16S rRNA
  source 1..490: mol_type = genomic DNA
agagtttgatcatggctcaggatgaacgctggcggcgtgcctaacacatgcaagtcgaacggaacttttaaggaacaagacttcggtcaagtgaaatttaagtttagtggcggacgggtgagtaacgcgtgagcaacctgcctctcagagggggataacgtccggaaacggacgctaataccgcataacatggagagatcgcatgatcattccatcaaagattttatcgctgagagatgggctcgcgtccgattaggctgttggtgaggtaacggctcaccaaaccgacgatcggtagccggactgagaggttgaacggccacattgggactgagacacggcccagactcctacgggaggcagcagtggggaatattgcacaatgggcgcaagcctgatgcagcaacgccgcgtgagggaagacggttttcggattgtaaacctctgtcattggtgacgaagaagtgacggtagccaatgaggaagccac

SEQ ID NO: 7116 - DNA, 490 bp, unidentified
  misc_feature 1..490: note = Ascusbbf_1880860, encodes 16S rRNA
  source 1..490: mol_type = genomic DNA
agagtttgatcatggctcaggatggacgctagcggcaggcttaacacatgcaagtcgaggggcatcgcggagtagcaatactctggcggcgaccggcgaaagggtgcgtaacgcgtgagcaacattcccgtatttgggggataagcagtggaaacgctgtctaataccccataacaacagagtccgcatggactttgcttgaaagattcgtcgaatacggattggctcgcgtggcattagctagtcggcggggtaacggcccaccgaggcaacgatgcctaggggttctgagaggaagaccccccacattgggactgagacacggcccaaactcctacgggaggcagcagtgaggaatattggtcaatggacggaagtctgaaccagccatgccgcgtgaaggatcacggccctatgggttgtaaacttcttttgtgacagagcaataaggcgtacgtgtacgccgatgagagtatgccacgaataagca

SEQ ID NO: 7117 - DNA, 490 bp, unidentified
  misc_feature 1..490: note = Ascusbbf_1809385, encodes 16S rRNA
  source 1..490: mol_type = genomic DNA
agagtttgatcatggctcaggacgaacgctggcggcgtgcctaacacatgcaagtcgaacggacttagctggatgcttgcatccggcgacagttagtggcggacgggtgagtaacgcgtgaataacctgcccaatagagggggataacgtttggaaacgaacgctaataccgcataacattatgatatcgcatggtattgtaatcaaaggagcaatccgctgatggatggattcgcgtccgattagctagttggtgagataacagctcaccaaggcgacgatcggtagccggactgagaggctgaacggccacattgggactgagacacggcccagactcctacgggaggcagcagtgggggatattgcacaatgggggaaaccctgatgcagcaacgccgcgtgagggaagaaggttttcggattgtaaacctctgtcctaggtgaagataatgacggtagcctaggaggaagctccggctaactacgt

SEQ ID NO: 7118 - DNA, 490 bp, unidentified
  misc_feature 1..490: note = Ascusbbf_1748008, encodes 16S rRNA
  source 1..490: mol_type = genomic DNA
agagtttgatcatggctcaggatgaacgctggcggcgtgcctaacacatgcaagtcgagcgaagcactttggctgatccttcgggtgttgccccagtgactgagtggcggacgggtgagtaacgcgtgggtaacctgccctgtacagggggataacagtcagaaatgactgctaataccgcataagcgcacgagaggacatccttttgtgtgaaaaactccggtggtacaggatgggcccgcgtctgattagcttgttggcggggtaatagcccaccaaggcgacgatcagtagccggtctgagaggatgaacggccacattggaactgagacacggtccaaactcctacgggaggcagcagtggggaatattgcgcaatggggggaaccctgatgcagcaacgccgcgtgagtgaagaagtatttcggtatgtaaagctctatcagcagggaagataatgacggtacctgactaagaagctccggctaa

SEQ ID NO: 7119 - DNA, 490 bp, unidentified
  misc_feature 1..490: note = Ascusbbf_361815, encodes 16S rRNA
  source 1..490: mol_type = genomic DNA
agagtttgatcatggctcaggatgaacgctagcggcaggcttaacacatgcaagtcgaggggcagcgcgggctgagtagcaatacaacgcctggcggcgaccggcggaagggtgcgtaacgcgtgagcaacttgcccgtatcagggggataaccggtggaaacgccgcctaataccccataacaacggaggtcacatgacctttgtttgaaagctacggcggatacggatgggctcgcgtgacattagctagttggagaggtaacggctcaccaaggcgacgatgtctaggggttctgagaggaaggtcccccacactggaactgagacacggtccagactcctacgggaggcagcagtgaggaatattggtcaatgggcggaagcctgaaccagccatgccgcgtgaaggaataaggtcctatggattgtaaacttcttttgagcgggagcaataagggctacgcgtagtccgatgagagtaccgttcg

SEQ ID NO: 7120 - DNA, 490 bp, unidentified
  misc_feature 1..490: note = Ascusbbf_382545, encodes 16S rRNA
  source 1..490: mol_type = genomic DNA
agagtttgatcatggctcaggacgaacgctggcggcgtgctttaaacatgcaagtcgaacgggaattgcgagggagcttgctcctttgcaattctagtggcggacgggtgagtaacgcgtgagcaatctgcctatcacagggggacaacagttggaaacgactgctaataccgcatgagaccacaaccatacatgtggaaggggtcaaaggagcaatccggtgatagaggagcttgcgtctcattagctagttggtgaggtaacggcccaccaaggcgacgatgagtagccgatctgagaggatgaccggccacactggaactgagaaacggtccagactcctacgggaggcagcagttaggaatattgggcaatggagggaactctgacccagcaacgccgcgtgaaggaagaaggttttcggattgtaaacttctgatctaggggaaaaagaaagtgatggtaccctaggagaaagccacggctaact

SEQ ID NO: 7121 - DNA, 490 bp, unidentified
  misc_feature 1..490: note = Ascusbbf_232082, encodes 16S rRNA
  source 1..490: mol_type = genomic DNA
agagtttgatcatggctcagaataaacgctggcggcgtgcctaacacatgcaagtcgagcgagaaagctccttcgggagtaagtaaagcggcgaacgggtgagttacgcgtgagaatctaccttttagtgaagaatacccttgagaaatcgaggctaatactgcataagtcccttcggggagaaagatggcctctttgctgtcgctaaaagatgagcttgcgtgctattagctagttggtagggtaaaggcctaccaaggcaatgatggctagccggcctgagagggtgtacggccacactggaacttagacacggtccagactcctacgggaggcagcagtgaggaatattgcgcaatgggcgaaagcctgacgcagcgacgccgcgtggaggatgaaggtctttggattgtaaactcctgttaagtgggaagaaaagcctgtttttaatagaaacaggtaatgacggtaccattagagaaagcaccgg

SEQ ID NO: 7122 - DNA, 490 bp, unidentified
  misc_feature 1..490: note = Ascusbbf_23812, encodes 16S rRNA
  source 1..490: mol_type = genomic DNA
agagtttgatcatggctcaggattaacgctggcggcatgcctaatacatgcaagtcgaatggtagcaataccatggcgaacgggtgagtaacacgtaggtaacctgtctttaagacgaggataaccgatggaaacgtcggataatactcgataggtaatctgagggcatcctaagattattaaagatttatcacttagagaggggcctgcggcgcattagctagatggcggggtaagagcccaccatggcgatgatgcgtagccggactgagaggttgaacggccacaatgggactgagaacggcccatactcctacgggaggcagcagtagggaattttcggcaatgggcgaaagcctgaccgagcaatgccgcgtgaacgaagaagtatttcggtatgtaaagttcttttattggggaagaaaaataaccaaattgacggtacccaatgaataagctccggctaactacgtgccagcagccgcggtaa

SEQ ID NO: 7123 - DNA, 490 bp, unidentified
  misc_feature 1..490: note = Ascusbbf_133772, encodes 16S rRNA
  source 1..490: mol_type = genomic DNA
agagtttgatcatggctcaggacgaacgctggcggcgtgcctaatacatgcaagtcgagcgaatctttgggagcttgctcttttaagattagcggcggacgggtgagtaacacgtgggcaacctgcctgtaagacggggataactccgggaaaccggggctaataccggatgattcttctctgcacatgcagggaagctaaaagatggtttacgctatcgcttacagatgggcccgcggcgcattagctagttggtgaggtaacggctcaccaaggcgacgatgcgtagccgacctgagagggtgatcggccacactgggactgagacacggcccagactcctacgggaggcagcagtagggaatcttccacaatggacgaaagtctgatggagcaacgccgcgtgagcgatgaaggccttcgggtcgtaaagctctgttgttagggaagaacaagtaccggagtaactgccggtaccttgacggtacct

SEQ ID NO: 7124 - DNA, 490 bp, unidentified
  misc_feature 1..490: note = Ascusbbf_1822299, encodes 16S rRNA
  source 1..490: mol_type = genomic DNA
agagtttgatcctggctcagattgaacgctggcggcaggcctaatacatgcaagtcgaggggcagcgcgggtagcaatacctggcggcgaccggcgaaagggtgagtaacgcgtgagcaacgtgcccgtatgtgggggatagtcgatggaaacgtcgcgtaataccccgtaatacattctcccgcatgagaggatgttgaaagatttattgcatacggatcggctcgcgtgccattaggtagacggcggggtaacggcccaccgtgccgacgatggctaggggttctgagaggaaggtcccccacattggaactgagacacggtccagactcctacgggaggcagcagtgaggaatattggacaatggccggaaggctgatccagccatgccgcgtgcgggaggacggccctatgggttgtaaaccgcttttgcgagggagcaataagggtaacgtgttgcccgatgagagtacctcgcgaataagcatc

SEQ ID NO: 7125 - DNA, 490 bp, unidentified
  misc_feature 1..490: note = Ascusbbf_1609513, encodes 16S rRNA
  source 1..490: mol_type = genomic DNA
agagtttgatcctggctcaggacgaacgctggcggcgtgcctaacacatgcaagtcgaacgaggtccatccttcgggagaagacctagtggcgaacgggtgagtaacacgtgaggaacctgccccggagaccgggataaccattcgaaaggatggctaataccggatacccccatcttgtcgcatggcgagatgaggaaatggattccgctccgggagggcctcgcggcctatcagctagttggtgaggtaacggctcaccaaggcatcgacgggtagctggtctgagaggacgatcagccacactgggactgagacacggcccagactcctacgggaggcagcagtggggaatcttgcgcaatgggcgaaagcctgacgcagcaacgccgcgtgggggatgaaggctctcgggttgtaaacccctttcagcaggaacgaaaatgacggtacctgcagaagaagccccggctaactacgtgccagcagcc

SEQ ID NO: 7126 - DNA, 490 bp, unidentified
  misc_feature 1..490: note = Ascusbbf_62537, encodes 16S rRNA
  source 1..490: mol_type = genomic DNA
agagtttgatcctggctcaggatgaacgctggcggcgtgcctaatacatgcaagtcgaacgagagaccccagcttgctgggcgatcgagtggcgaacgggtgagtaacacataaacaatctaccctgaagactgggataacgtagggaaacccacgctaataccggataggcagagggagggcatccttccactgttaaagttgggctacaacactgcaggatgagtttatgtcgcattagttagttggtgaggtaacggcccaccaagacgatgatgcgtagccggtctgagaggatgaacggccacattgggactgagacacggcccagactcctacgggaggcagcagtagggaattttcggcaatgggggaaaccctgaccgagcaacgccgcgtgaacgatgaaggtttttggatcgcagagttctgttgtaagggaagaaagctagagatagggaatgatctttagttgacggtaccttgccag

SEQ ID NO: 7127 - DNA, 470 bp, unidentified
  misc_feature 1..470: note = Ascusbbf_1410423, encodes 16S rRNA
  source 1..470: mol_type = genomic DNA
agagtttgatcatggctcagaacgaacgctggcggcaggcttaacacatgcaagtcgagcgcactcttcggagtgagcggcagacgggtgagtaacacgtggaaatctacctatctctagggaataactcagggaaacttgtgctaataccctatacgtccgtaaggagaaagatttatcggagatagatgagcccgcgttggattagctagttggtgaggtaatggctcaccaaggcgacgatccatagctggtctgagaggatgatcagccacactgggactgagacacggcccagactcctacgggaggcagcagtggggaatattggacaatgggcgcaagcctgatccagccatgccgcgtgagtgatgaccgccctagggttgtaaagctctttcagtggggaagataatgacggtacccacagaagaagccccggctaacttcgtgccagcagccgcggtaat

SEQ ID NO: 7128 - DNA, 490 bp, unidentified
  misc_feature 1..490: note = Ascusbbf_314281, encodes 16S rRNA
  source 1..490: mol_type = genomic DNA
agagtttgatcatggctcaggatgaacgctggcggcgtgcttaacacatgcaagtcgaacggggaacatttcattgaggcttcggcggatttggtctgtttctagtggcggacgggtgagtaacgcgtgggtaacctgccttatactgggggataacagccagaatggctgctaataccgcataagcgcacagaaccgcatggttccgtgtgaaaaactccggtggtataagatggacccgcgttggattagctagttggcagggcagcggcctaccaaggcgacgatccatagccggcctgagagggtgaacggccacattgggactgagacacggcccagactcctacgggaggcagcagtggggaatattgcacaatgggggaaaccctgatgcagcgacgccgcgtgaaggaagaagtatctcggtatgtaaacttctatcagcagggaagataatgacggtacctgactaagaagccccggctaa

SEQ ID NO: 7129 - DNA, 490 bp, unidentified
  misc_feature 1..490: note = Ascusbbf_1343808, encodes 16S rRNA
  source 1..490: mol_type = genomic DNA
agagtttgatcatggctcaggataaacgctggcggcgcacataggacatgcaagtcgaacggaagccgtaataaaaatggattgaagatttatcagattgaagtttttattacaatgactttagtggcggactggtgagtaatgtataagtaacctgcctattagaggggaacaacagttggaaacgactgctaataccgcatatgccataggaatcgcatggttccagtgggaaaggagcaatccgctaatagatggacttatatctgattagtcagttggtggggtaacggcctaccaagacgacgatcagtagccggactgagaggttaaacggccacattgggactgagatacggcccagactcctacgggaggcagcagtcggggatattgcgcaatggaggaaactctgacgcagtgacgccgcgtacaggaagaaggttttcggattgtaaactgctttagacagggaagaaaatagacagta

SEQ ID NO: 7130 - DNA, 490 bp, unidentified
  misc_feature 1..490: note = Ascusbbf_52271, encodes 16S rRNA
  source 1..490: mol_type = genomic DNA
agagtttgatcatggctcaggatgaacgctggcggcgtgcttaacacatgcaagtcgaacgaagcactgggaatgagatcttcggatggattttcctttgacttagtggcggacgggtgagtaacgcgtgggtaacctgccgtatgcagggggacaacagttggaaacggctgctaataccgcgtaagcgcacgacaccgcatggtgacgtgtgaaaagatttatcggcatacgatggacccgcgtctgattaggtagttggtgaggtaacggcccaccaagccgacgatcagtagccgacctgagagggtgaccggccacattgggactgagacacggcccaaactcctacgggaggcagcagtggggaatattgcacaatgggggaaaccctgatgcagcgacgccgcgtgagtgaagaagtatttcggtatgtaaagctctatcagcagggaagaagatgacggtacctgcacaagaagccccggct

SEQ ID NO: 7131 - DNA, 490 bp, unidentified
  misc_feature 1..490: note = Ascusbbf_53877, encodes 16S rRNA
  source 1..490: mol_type = genomic DNA
agagtttgatcctggctcaggatgaacgctagcggcaggcctaacacatgcaagtcgaggggtatagagtagcttgctattctagagaccggcgcacgggtgagtaacgcgtatgcaacctaccttttacaaagggatagcccggagaaattcggattaataccttatagtattacgatatagcattgtattgtaattaaagttttaacggtaaaagatgggcatgcgtcctattagttagatggtgtggtaacggcacaccatgactgcgataggtaggggtcctgagagggagatcccccacactggaactgagacacggaccagactcctacgggaggcagcagtgaggaatattggacaatggtcgcaagactgatccagccatgccgcgtgcaggaagactgccctatgggttgtaaactgcttttatatgggaagaataagggctacgtgtagcctgatgacggtaccatatgaataagcatcg

SEQ ID NO: 7132 - DNA, 490 bp, unidentified
  misc_feature 1..490: note = Ascusbbf_1371494, encodes 16S rRNA
  source 1..490: mol_type = genomic DNA
agagtttgatcatggctcaggataaacgctggcggcgcacataagacatgcaagtcgaacggaagtcgttataattgatatggattgaagatttctcggattgaagttgattttataacaatggctttagtggcggactggtgagtaacgcgtgagcaacctgcctatcagaggggaataacagtgagaaatcattgctaataccgcatatgccataatcaccacatggtgatagtgggataggagcaatccgctgatagatgggctcgcgtctgattagatagttggtggggtaacggctaaccaggtggacgaccattagccgtactgggaggttgaacggcaacattgggactgagatacggcccagactcctacgggaggcagcagtcgggaatattgcgcaatggaggaaactctgacgcagtgacgccgcgtataggacgaaggtcttcggattgtaaactattgtcgttagggaagaaaaagg

SEQ ID NO: 7133 - DNA, 490 bp, unidentified
  misc_feature 1..490: note = Ascusbbf_390584, encodes 16S rRNA
  source 1..490: mol_type = genomic DNA
agagtttgatcctggctcaggatgaacgctggctacaggcttaacacatgcaagtcgaggggaaacgacgggggagcttgctttcccgggcgtcgaccggcgaatgggtgagtaacgcgtatccaacctgccgccaagcagcggataacccgtggaaatgcggactaatacgctatgcggtccttggagggcatctgacgaggacgaaaggcattccgcttggcgatggggatgcgtccgattaggcagtaggcggggcaacggcccacctagccttcgatcggtaggggttctgagaggaaggtcccccacactggtactgagacacggaccagactcctacgggaggcagcagtgaggaatattggtcaatgggcggtagcctgaaccagccaagtagcgtgcgggacgaaggccctacgggtcgtaaaccgcttttgcgcggggataaagtggcccacgtgtgggtctttgcaggtaccgcgcgaat

SEQ ID NO: 7134 - DNA, 490 bp, unidentified
  misc_feature 1..490: note = Ascusbbf_253141, encodes 16S rRNA
  source 1..490: mol_type = genomic DNA
agagtttgatcctggctcaggatgaacgctggcggcgtgcctaacacatgcaagtcgaacgattaaagcccctccgggggtgcatagagtggcgaacgggtgagtaacacgtgaccaacccgccccggacaccgggacaacgggcggaaacgcctgctaataccggatactccgcgacggacgcatgtccgacgcgggaaagcccaggcggtccgggatggggtcgcggcccatcagctagacggcggggtgacggcccaccgtggcgactacgggtagccgggttgagagaccgaccggccacattgggactgagacacggcccagactcctacgggaggcagcagtggggaatattgcgcaatgggggcaaccctgacgcagcaacgccgcgtgcgggacgaaggccttcgggtcgtaaaccgctttcaccggggaagaccaagcgactgtacccggggaagaagccccggctaaatacgtgccagca

SEQ ID NO: 7135 - DNA, 490 bp, unidentified
  misc_feature 1..490: note = Ascusbbf_374087, encodes 16S rRNA
  source 1..490: mol_type = genomic DNA
agagtttgatcctggctcaggacgaacgctggcggcgtgcctaacacatgcaagtcgaacgggggcgcgacaaaaccgaggcttcggccaaggcgttgcgccttagtggcggacgggtgagtaacgcgtggacaacctgccgcctgctgggggataacagggggaagcccctgctaataccgcataagccctttctgggacatcccagggaggggaaaggtttatccggcaggcgatgggtccgcgtccgattagccagttggcggggtaacggcccaccaaagcgacgatcggtagccggcctgagagggcggacggccacattgggactgagatacggcccagactcctacgggaggcagcagtgggggatattgcacaatggggggaaccctgatgcagcgacgccgcgtgggcgaagtagcgcttcggcgcgtgaagccctttcggcaggagggaaacagacggtacctgcagaagaagcaccggc

SEQ ID NO: 7136 - DNA, 490 bp, unidentified
  misc_feature 1..490: note = Ascusbbf_189127, encodes 16S rRNA
  source 1..490: mol_type = genomic DNA
agagtttgatcctggctcaggatgaacgctagctacaggcttaacacatgcaagtcgaggggaaacgacatagagtgcttgcactttatgggcgtcgaccggcgaatgggtgagtaacgcgtatccaacctgcccttgactgagggatagcccagtgaaaactgaattaatacctcatgtcctcctcagacggcatcagacgaggagtaaagattaatcggtcaaggatggggatgcgtctgattagctagttggtggggcaacggcctaccaaggcgacgatcagtagccggtctgagaggatgaacggccacattggaactgagacacggtccagactcctacgggaggcagcagtggggaatcttccgcaatgggcgaaagcctgacggagcaacgccgcgtgagtgaagaaggccttcgggtcgtaaagctctgttgtcggggacgaatgtacgagctatcaacaacagcttgtaatgacggtacc

SEQ ID NO: 7137 - DNA, 490 bp, unidentified
  misc_feature 1..490: note = Ascusbbf_35774, encodes 16S rRNA
  source 1..490: mol_type = genomic DNA
agagtttgatcatggctcaggacgaacgctggcggcgtgcctaacacatgcaagtcgagcggagataatgaacttcggtttattatttcagcggcggacgggtgagtaacgcgtgaaggacctgcccccgacagagggataacatcgagaaatcggtgctaataccgcataagaccacggtgctgcatggcactgaggtaaaaggagcaatccggtcggggatggcttcgcgtcccattagatcgtaggcggggtaacggcccacctagtcaacgatgggtagccgacctgagagggtgatcggccacactggaactgagacacggtccagactcctacgggaggcagcagtgggaatattgggcaatgggcgaaagccttacccagcaacgccgcgtgagagaagaaggttttcggattgtaaatctctgtcctgggggacgaaggaagtgacggtaccccgggaggaagccccggctaactacgtgcc

SEQ ID NO: 7138 - DNA, 490 bp, unidentified
  misc_feature 1..490: note = Ascusbbf_122097, encodes 16S rRNA
  source 1..490: mol_type = genomic DNA
agagtttgatcatggctcaggatgaacgctggcggcgtgcctaacacatgcaagtcgaacggggttataaggaatgagattcgtcgaatgaattataacttagtggcggacgggtgagtaacgcgtgggtaacctgcctcatcgaggggaataacagttggaaacggctgataataccgcataagcgcacagcagcgcatgctggagtgtgaaaagatttatcgcgatgagatggacccgcgtctgattaactagttggcagggtaacggcctaccaaggtgacgatcagtagccggactgagaggttgaacggccacattgggactgagacacggcccaaactcctacgggaggcagcagtgggggatattgcacaatggggggaaccctgatgcagcgacgccgcgtgggtgaagaagtctttcgggatgtaaagccctatcagcagggaagataatgacggtacctgcagaagaagccccggctaac

SEQ ID NO: 7139 - DNA, 470 bp, unidentified
  misc_feature 1..470: note = Ascusbbf_23290, encodes 16S rRNA
  source 1..470: mol_type = genomic DNA
agagtttgatcctggctcagaacgaacgctggcggcaggcctaacacatgcaagtcgaacgccctagcaatagggagtggcagacgggtgagtaacgcgtgggaaccttcccaatggtacggaatagcccagggaaacttggagtaataccgtataagcccgcaaggggaaagatttatcgccattggatgggcccgcgtaggattagctagttggtgaggtaatggctcaccaaggcgacgatccttagctggtctgagaggacgaccagccacactgggactgagacacggcccagactcctacgggaggcagcagtggggaatattggacaatgggcgcaagcctgatccagccatgccgcgtgagtgatgaaggccttagggttgtaatgctcttttagcggggaagataatgacggtacccgcagaataagccccggctaacttcgtgccagcagccgcggtaat

SEQ ID NO: 7140 - DNA, 490 bp, unidentified
  misc_feature 1..490: note = Ascusbbf_116299, encodes 16S rRNA
  source 1..490: mol_type = genomic DNA
agagtttgatcatggctcaggattaacgctggcggcgtgcctaacacatgcaagtcgagcgagaattagaggaatgattcttcggatgaatttctttaaggacagcggcggacgggtgagtaacgcgtgggcaacctgcccctttccggaggatagccaagggaaactttgaataatactccataaagcatttctgccgcatgacagagatgccaaagatttatcggagagggatgggcccgcgtctgattagccagttggtgaggtagcggctcaccaaagcgacgatcggtagccggcctgagagggtgaacggccacattggaactgagacacggtccagactcctacgggaggcagcagtggggaatattgcacaatgggcggaagcctgatgcagcaacgccgcgtgaaggaagaaggttttcggatcgtaaacttctgtccctggggaagaagaaagtgacggtacccaaggaggaagccccgg

SEQ ID NO: 7141 - DNA, 490 bp, unidentified
  misc_feature 1..490: note = Ascusbbf_1586, encodes 16S rRNA
  source 1..490: mol_type = genomic DNA
agagtttgatcatggctcaggatgaacgctagcgacaggcctaacacatgcaagtcgaggggcagcgagaggaaagcttgcttttcttgtcggcgaccggcgcacgggtgagtaacgcgtatgcaacctggctactgctacgggatagccttgcgaaagtaagattaataccgtatgtgctgagtttagacatctttattcagtgaaagatttatcggcagtagatgggcatgcgtctgattagttagttggcggggtaacggcccaccaaggcgacgatcagtaggggttctgagaggaaggtcccccacattggaactgagacacggtccaaactcctacgggaggcagcagtgaggaatattggtcaatggacggaagtctgaaccagccaagtcgcgtgaaggaagacggttctatggattgtaaacttcttttgctcgagggtaaagtgtggtacgtgtaccatattgcaagtatcgagtgaata

SEQ ID NO: 7142 - DNA, 490 bp, unidentified
  misc_feature 1..490: note = Ascusbbf_845, encodes 16S rRNA
  source 1..490: mol_type = genomic DNA
agagtttgatcatggctcaggatgaacgctagctacaggcttaacacatgcaagtcgagcggaacactttcgggtgtttagcggcagacgggtgagtaacacgtatccaacctttcccttactcgggtatagcctttagaaatgaagagtaatccccgatgtggtgcacagtccgcatgttttgcgcactaaagattaatcggtaaggggtggggatgcgttccattaggtagtaggcggggtaacggcccacctagccgatgatggataggggttctgagaggaaggtcccccacattggaactgcgacacggtccaaactcctacgggaggcagcagtgaggaatattggtcaatgggcgagagcctgaaccagccaagtagcgtgcaggatgacggccctatgggttgtaaactgcttttatacgggaataacggtaggctcgtgagcctatgtgcatgtaccgtatgaataaggatcggctaactc

SEQ ID NO: 7143 - DNA, 490 bp, unidentified
  misc_feature 1..490: note = Ascusbbf_3228, encodes 16S rRNA
  source 1..490: mol_type = genomic DNA
agagtttgatcatggctcaggacgaacgctggcggcgtgcctaacacatgcaagtcgaacgaacttactagcaatagtaagttagtggcggacgggtgagtaatacatgagtaacctgccttatacagggggataacacctagaaatgggtgctaataccgcataataactcagtatggcatcatattgagaggaaaggagcaatccggtaaaagatggactcatgttcgattagctagttggtgaggtaatggctcaccaaggcaacgatcgatagccgaactgagaggttgatcggccacattggaactgagaaacggtccagactcctacgggaggcagcagtggggaatattgcgcaatgggggaaaccctgacgcagcaacgccgtgtgaaggaagaaggctctagggttgtaaacttctttgattagggacgaaacaaatgacggtacctaaagaacaagccacggctaactacgtgccagcag

SEQ ID NO: 7144 - DNA, 490 bp, unidentified
  misc_feature 1..490: note = Ascusbbf_43325, encodes 16S rRNA
  source 1..490: mol_type = genomic DNA
agagtttgatcatggctcaggatgaacgctggcggcgtgcctaatacatgcaagtcgaacgagggtgcttgcaccctagtggcgaacgggtgagtaacacgtaggtaacctgccttttagcttgggatacccagaggaaactttggctaataccggataacaacagatgaggcatctcaactgtttgaaaggcccttatggggtcactaaaagatggacctgcggcgcattagctagttggtgagataacagcccaccaaggcgaggatgcgtagccgacctgagagggtgatcggccacattggaactgagacacggtccaaactcctacgggaggcagcagtaaggagttttcggcaatgggggaaaccctgaccgagcaacgccgcgtgagcgatgacggccctatgggttgtaaagctctgttgtgagggacgaactgtaagcttaggaaatgaagcttacctgacggtaccttaccagaaagcca

SEQ ID NO: 7145 - DNA, 490 bp, unidentified
  misc_feature 1..490: note = Ascusbbf_149885, encodes 16S rRNA
  source 1..490: mol_type = genomic DNA
agagtttgatcatggctcaggacgaacgctggcggcgtgcctaatacatgcaagtcgagcggacttgatggagtgcttgcactcctgaaggttagcggcggacgggtgagtaacacgtaggcaacctgccctcaagactgggataactaccggaaacggtagctaataccggataatttattttgcagcattgtgaaataatgaaaggcggagcaatctgtcacttgaggatgggcctgcggcgcattagctagttggtggggtaacggctcaccaaggcgacgatgcgtagccgacctgagagggtgaacggccacactgggactgagacacggcccagactcctacgggaggcagcagtagggaatcttccgcaatgggcgaaagcctgacggagcaacgccgcgtgagtgatgaaggttttcggatcgtaaagctctgttgccaaggaagaacgtcttctagagtaactgctaggagagtgacggta

SEQ ID NO: 7146 - DNA, 490 bp, unidentified
  misc_feature 1..490: note = Ascusbbf_72286, encodes 16S rRNA
  source 1..490: mol_type = genomic DNA
agagtttgatcatggctcaggatgaacgctggcggcgtgcctaacacatgcaagtcgaacgaagcacttttcccgaggaagaagcgtgcttgcacaaatcggactcatttaaagtgacttagtggcggacgggtgagtaacgcgtgggtaacctgccttatacagggggataacagttagaaatgactgctaataccgcataagcgcacggtatcgcatgatacagtgtgaaaagcgtaacggtataagatggacccgcgtctgattagccagttggtgaggtaacggctcaccaaagcgacgatcagtagccggcctgagagggtgaacggccacattgggactgagacacggcccaaactcctacgggaggcagcagtgggggatattgcacaatgggggaaaccctgatgcagcgacgccgcgtgagtgatgaagtatttcggtatgtaaagctctatcagcagggaagaaaatgacggtacctgac

SEQ ID NO: 7147 - DNA, 490 bp, unidentified
  misc_feature 1..490: note = Ascusbbf_221227, encodes 16S rRNA
  source 1..490: mol_type = genomic DNA
agagtttgatcatggctcaggatgaacgctggcggcgtgcctaacacatgcaagtcgaacgaggctctgcggtatgaagattcgtctgaataccaaggatgtccgagtggcggatgggtgagtaacgcgtggagaacctgcccttatcagggggataacaactggaaacggttgacaataccgcatacgctctgtttaccgcatggtatacagaggaaagattatatcggataaggatggctccgcgtcggattagccagttggcggggtaacggcccaccaaagcgacgatccgtagccggcctgagagggcgaccggccacattgggactgagacacggcccagactcctacgggaggcagcagtgggggatattgcacaatggggggaaccctgatgcagcgacgccgcgtggaggaggaagtatttcggtatgtaaactcctatcagcagggaagaaaatgacggtacctgactaagaagccccgg

SEQ ID NO: 7148 - DNA, 490 bp, unidentified
  misc_feature 1..490: note = Ascusbbf_191712, encodes 16S rRNA
  source 1..490: mol_type = genomic DNA
agagtttgatcctggctcaggatgaacgctggcggcgtgcctaatacatgcaagtcgaacgaggattcaagggagcttgctcctgagaaacctagtggcgaacgggtgagtaacacgtaggtaacctgccttttagcttgggatacccagaggaaactttggctaataccggataacaacaaccgaggcatctcggatgcttgaaaggccctgcaaggggtcactaaaagatggacctgcggcgcattagctagttggtgagataacagcccaccaaggcgaggatgcgtagccgaactgagaggttgatcggccacattggaactgagacacggtccaaactcctacgggaggcagcagtaaggagttttcggcaatgggggaaaccctgaccgagcaacgccgcgtgtgtgatgacggccctatgggttgtaaagcacttttataagagacgaatggtgagtttaggaaatgaagctcacttgactgt

SEQ ID NO: 7149 - DNA, 490 bp, unidentified
  misc_feature 1..490: note = Ascusbbf_323733, encodes 16S rRNA
  source 1..490: mol_type = genomic DNA
agagtttgatcctggctcaggacgaacgctggcggcatgcttaacacatgcaagtcgaacggacgaccggattcagaatcttcggaagacgaatttggaagttagtggcggacgggtgagtaacgcgtgggtaacctgccctttaaattgggacaacagttggaaacgactgctaataccgaatgagtcgatgataaggcatcttgttatcgggaaaggcggcctctcaaagaagctgtcgttaaaggatggacccgcgtctgattagcttgttggtaaggtaggggcttaccaaggcgacgatcagtagccgacctgagagggtgaccggccacattgggactgagacacggcccagactcctacgggaggcagcagtggggaattttccgcaatgggcgcaagcctgacggagcaatgccgcgtgaatgaagaaggtcttcggatcgtaaagttctgtcatcggggaagaacggacaatagtttaaga

SEQ ID NO: 7150 - DNA, 490 bp, unidentified
  misc_feature 1..490: note = Ascusbbf_931646, encodes 16S rRNA
  source 1..490: mol_type = genomic DNA
agagtttgatcctggctcaggattaacgctggcggcgcacataagacatgcaagtcgaacggaagtcgttaccaaaggaagtgaagatttatcggaacggaatttagtaacaatggctttagtggcggactggtgagtaacacgtaagtaacctgcctatcagaggggaataacagtgagaaatcattgctaataccgcataagctgacagtatcgcatgatacagttagaaaaggagcaatccgctgatagatggacttgcggccgattagccagttggtggggtaaaggcctaccaaagcaacgatcggtagccgagctgagaggctcaacggccacattgggactgagatacggcccagactcctacgggaggcagcagtcgggaatattgcgcaatggaggaaactctgacgcagtgacgccgcgtataggaagaaggttttcggattgtaaactattttagacagggaagaagatgacagtacct

SEQ ID NO: 7151 - DNA, 490 bp, unidentified
  misc_feature 1..490: note = Ascusbbf_143510, encodes 16S rRNA
  source 1..490: mol_type = genomic DNA
agagtttgatcctggctcaggatgaacgctggcggcgtgcataacacattcaagtcgaacggtgaagcaccttcgggtgtggagcagtggcggacgggtgagtaacgcgtgagcaacctgccgtatagtgggggataacacagggaaacttgtgctaataccgcataacgcatagggaccgcatgatctttatgccaaagatttattgctgtacgatgggctcgcgtatgattagacagttggcagggtaacggcctaccaaatcaacgatcattagccgaactgagaggttgaacggccacattggaactgagaaacggtccagactcctacgggaggcagcagtggggaatattgggcaatgggcgaaagcctgacccagcgacgccgcgtgagggaagaaggtcttcggattgtaaacctctttcagcagggaagaaggaagtgacggtacctgcagaagaagtcacggctaactacgtgccagcag

SEQ ID NO: 7152 - DNA, 490 bp, unidentified
  misc_feature 1..490: note = Ascusbbf_91467, encodes 16S rRNA
  source 1..490: mol_type = genomic DNA
agagtttgatcatggctcaggatgaacgctggcggcgtgcctaatacatgcaagtcgaacgggtacagctatgtactagtggcgaacgggtgagtaacacgttggtgacctgccccaaagatgggaatatcggctggaaacggccggcaaaaccgaataagcttatccggatcagaagaggataagtaaaagcgcaagctactttgggaggggcctgcggcccatcagttagttggtgagggtaacggcccaccaagacgaagacgggtaggggacctgagagggtggtcccccacaatggaactgaaacacggtccatacacctgcgggtggcagcagtagggaatattgctaaatgggcgaaagcctgaagcagcaacgccgcgtggacgaaggaggccttcgggtcgtaaagtccttttataggggaaaaggaaggatggtaccctatgaataagtctcggctaactacgtgccagcagccgcggta

SEQ ID NO: 7153 - DNA, 490 bp, unidentified
  misc_feature 1..490: note = Ascusbbf_4394, encodes 16S rRNA
  source 1..490: mol_type = genomic DNA
agagtttgatcatggctcaggacgaacgctggcggcgtgcctaacacatgcaagtcgaacggagatattccggattgagatttcggttgattgaaaggatatcttagtggcggacgggtgagtaacgcgtgagtaacctgcccataagagggggataacgttctgaaaagaacgctaataccgcataacatatgtaattcgcatggaagacatatcaaaggagcaatccgcttatggatggactcgcgtccgattagctagttggcgggataacagcccaccaaggcgacgatcggtagccggactgagaggttgaacggccacattgggactgagacacggcccagactcctacgggaggcagcagtgggggatattgcgcaatgggggaaaccctgacgcagcaacgccgcgtgaatgaagaaggtcttcggattgtaaaattcttttgttgaggacgaaagaaatgacggtactcaacgaataagct

SEQ ID NO: 7154 - DNA, 490 bp, unidentified
  misc_feature 1..490: note = Ascusbbf_32025, encodes 16S rRNA
  source 1..490: mol_type = genomic DNA
agagtttgatcctggctcaggacgaacgctggcggtgtgcctcatacatgcaagtcgaacgagaagctgaagcttgcttcagtggaaagtggcggacgggtgagtaatgtgtagaaaatctgccctagagagggggacaacagagggaaactcctgctaataccccatatgagctaagttgaaatacttatcttgaaaactccggtgctctaggatgagtctgcatctgattagctagttggtggtgtaatggactaccaaggcgacgatcagtagctggtttgagaggatgatcagccacaatgggactgagacacggcccatactcctacgggaggcagcagtagggaattttgcgcaatgggcgaaagcctgacgcagcaacaccgcgtgaacgttaagcccttcggggtataaagttctgtcactggggaagaataaatgactgtacccagagaggaagcaccggctaactccgtgccagcagccg

SEQ ID NO: 7155 - DNA, 490 bp, unidentified
  misc_feature 1..490: note = Ascusbbf_154908, encodes 16S rRNA
  source 1..490: mol_type = genomic DNA
agagtttgatcatggctcagattgaacgctggcggcatgctttacacatgcaagtcgaacggcagcacgggtgcttgcacctggtggcgagtggcgaacgggtgagtaatgcgtcggaacgtaccgagtaatgggggataactaatcgaaagattggctaataccgcatacgcccttagggggaaagcaggggatcttcggaccttgcgttattcgagcggccgacgtctgattagctagttggtggggtaaaagcctaccaaggcgacgatcagtagcgggtctgagaggatgatccgccacactgggactgagacacggcccagactcctacgggaggcagcagtggggaattttggacaatgggcgaaagcctgatccagccatgccgcgtgtatgaagaaggccttcgggttgtaaagtacttttgttagggaagaaaagcttgaggttaatacccttgagtcatgacggtacctaaagaataagc

SEQ ID NO: 7156 - DNA, 490 bp, unidentified
  misc_feature 1..490: note = Ascusbbf_725418, encodes 16S rRNA
  source 1..490: mol_type = genomic DNA
agagtttgatcctggctcaggatgaacgctggcggcatgcctaagacatgcaagtcgaacgaagtggcccaacaaaaactgagtgcttgcacaaagttggcgatggaatttccacttagtggcagacgggtgagtaacacgtaagtaatctgccctagagactgggataatgtctggaaacggacactaataccggataattcatatttagataactagatatgctaaaaggagcgtttgctccactctaggatgagcttgcggcgtattaactagttggtggggtaatggcctaccaaggtgacgatgcgtagccgaactgagaggttgatcggccacattgggactgagacacggcccaaactcctacgggaggcagcagttaggaatattcgtcaatgggggaaaccctgaacgagcaatgccgcgtgagtgatgacggtctttatgattgtaaaactctgttgtaaggaacgaacccttaggatag

SEQ ID NO: 7157 - DNA, 490 bp, unidentified
  misc_feature 1..490: note = Ascusbbf_1510725, encodes 16S rRNA
  source 1..490: mol_type = genomic DNA
agagtttgatcatggctcaggatgaacgctagcggcaggcctaacacatgcaagtcgaggggtatagagagcttgctttctagagaccggcggatgggtgagtaacgcgtatgcaacctaccttttacaggggaatagcccggagaaattcggattaatgctccatggtttaattgaatggcatcgtttgattaataaagatttatcggtaaaagatgggcatgcgtatcattagctagttggtgtggtaacggcataccaaggctacgatgattaggggtcctgagagggagatcccccacactggtactgagacacggaccagactcctacgggaggcagcagtgaggaatattggtcaatggaggcaactctgaaccagccatgccgcgtgcaggatgacggtcctatggattgtaaactgcttttgtacgggaagaaatgtaattacgtgtaattatttgacggtaccgtaagaataaggatcggc

SEQ ID NO: 7158 - DNA, 490 bp, unidentified
  misc_feature 1..490: note = Ascusbbf_39677, encodes 16S rRNA
  source 1..490: mol_type = genomic DNA
agagtttgatcctggctcaggatgaacgctagcgacaggcttaacacatgcaagtcgaggggtaacatgggggtggcaacactcctgatgacgaccggcgcactggtgagtaacacgtatgcaacctgccccctgcaggggaataacccagggaaacttggcctaatgccgcataacacggctcgccgcatggcgtgccgttgaaagctccggcggcaggggatgggcatgcgcagcattagcttgttggcggggtgacggcccaccaaggcgacgatgcttaggggttctgagaggaaggtcccccacactggtactgagacacggaccagactcctacgggaggcagcagtgaggaatattggtcaatggccgcagggctgaaccagccaagtcgcgtgagggaagacggccctacgggttgtaaacctcttttgccggggagtaacgtggcgcacgcgtgcgtcagtgagagtacccggagaaaaag

SEQ ID NO: 7159 - DNA, 490 bp, unidentified
  misc_feature 1..490: note = Ascusbbf_339751, encodes 16S rRNA
  source 1..490: mol_type = genomic DNA
agagtttgatcctggctcagaacgaacgctggcggcatggattaggcatgcaagtcgaacgggagcagcaatgctccagtggcgcaagggtgaggaacacgtgaacaacctaccttcgagttggggatagcttctggaaacgggagataataccgaataacatcttttttccgcatggagaattgatcaaagcagcaatgcgcttgaagaggggttcgcgtcccattagctagttggtgaggtaacggcccaccaaggcgatgatgggtagctggtctgagaggacgatcagccacattgggactgagatactgcccagacccctacgggaggctgcagtcgagaattttgggcaatggacgaaagtctgacccagcaatgccgcgtgcgggatgaaggtcttcggattgtaaaccgctgtcaagagggacgaaatttgacggtacctctggaggaggccacggctaactacgtgccagcagccgcggta

SEQ ID NO: 7160 - DNA, 471 bp, unidentified
  misc_feature 1..471: note = Ascusbbf_126017, encodes 16S rRNA
  source 1..471: mol_type = genomic DNA
agagtttgatcctggctcagaacgaacgctggcggcaggcctaaaacatgcaagttgaacggccatagcaatatggcagtagcgcaagggtgagtaatgtatgggaacgtatcttttggtggggaatattctttggaaacgaagagcaataccgcataagccctacgggggaaagatttatcgccgattgagcggcccatattggattagctagttggttaggtaatggctgaccaaggctgtgatccatagctggtctgagaggacgatcagccacactgggactgagacacggcccagactcctacgggaggcagcagttaggaatattggacaatgggggcaaccctgatccagccatgccgcgtgagtgttaaggccttcgggttgtaaagctcttttgtatgggaaaatgatgatggtaccataagaataagcaccggctaacttcgtgccagcagccgcggtaat

SEQ ID NO: 7161 - DNA, 490 bp, unidentified
  misc_feature 1..490: note = Ascusbbf_327753, encodes 16S rRNA
  source 1..490: mol_type = genomic DNA
agagtttgatcatggctcaggacgaacgctggcggcgcgcctaacacatgcaagtcgaacgggactagtgaccggagcttagaaactttctaggttgcgttcactagttcagtggcggacgggtgagtaaagcatgagtaactttcccataagtggggaatagcttttggaaacagaagataataccgcatgaatcgttgaggacacatgttcacatcggaaaagaagcaattcgcttatggataggctcatgtctgattagcttgttggtgaggtaatggctcaccaaggcgatgatcagtagccgtaccgagaggttcaacggccacattgggactgagacacggcccagactcctacgggaggcagcagtgaggaatattgcgcaatggaggaaactctgacgcagcgacgccgcgtgaaggaagaaggtcttcggattgtaaacttctgtcttcagggaagaaacaaatgacggtacctggggagg

SEQ ID NO: 7162 - DNA, 490 bp, unidentified
  misc_feature 1..490: note = Ascusbbf_91000, encodes 16S rRNA
  source 1..490: mol_type = genomic DNA
agagtttgatcatggctcaggacgaacgctggcggcgtgcttaacacatgcaagtcgaacgaggttgccctttgtgaatccttcgggaggaactgtgggtataccgagtggcggacgggtgagtaacgcgtgagcaacctgccctgcaacgggggacaacagttggaaacgactgctaataccgcatgagaccacgaaaccgcatggttttgaggtaaaaggatttattcgatgcaggatgggctcgcgtcccattagatagttggtgaggtaacggcccaccaagtcaacgatgggtagccgacctgagagggtgatcggccacactggaactgagacacggtccagactcctacgggaggcagcagtggggaatattgggcaatgggggaaaccctgacccagcaacgccgcgtgagggaagaaggtcttcggattgtaaacctttgtcctatgggacgaaagaaatgacggtaccataggaggaagc

SEQ ID NO: 7163 - DNA, 490 bp, unidentified
  misc_feature 1..490: note = Ascusbbf_16587, encodes 16S rRNA
  source 1..490: mol_type = genomic DNA
agagtttgatcatggctcaggatgaacgctggcggcgtgcctaatacatgcaagtcgaacgctaatcttcggattagagtggcgaacgggtgagtaacacgtaggtaacctgcccataagacgaggataactactggaaacggtagctaatactggatagtatatgaagtcgcatggctttatatttaaaggtgctctcaagcatcacttatggatggacctgcggcgcattagctagttggtgaggtaacggcccaccaaggcgacgatgcgtagccggactgagaggttgaacggccacattgggactgagacacggcccagactcctacgggaggcagcagtagggaattttcggcaatggacgcaagtctgaccgagcaacgccgcgtgagtgatgaagttcttcggaacgtaaaattcttttatttggaaaaaacgtatagtgtaggaaatgacattatagtgatggtaccaaatgaataagccc

SEQ ID NO: 7164 - DNA, 490 bp, unidentified
  misc_feature 1..490: note = Ascusbbf_694925, encodes 16S rRNA
  source 1..490: mol_type = genomic DNA
agagtttgatcatggctcaggatgaacgctggcggcgtgcctaacacatgcaagtcgaacgaagcactcttgttgatccttcgggagaagcgaaagtgactgagtggcggacgggtgagtaacgcgtgggtaacctgccctgtacagggggataacagtcagaaatgactgctaataccgcataagcgcacggagggacatccttctgtgtgaaaaactccggtggtacaggatgggcccgcgtctgattagctagttggcggggtaagggcccaccaaggcgatgatcagtagccggtctgagaggatgaacggccacatcggaactgagacacggtccaaactcctacgggaggcagcagtggggaatattgcacaatggggggaaccctgatgcagcaacgccgcgtgagtgaagaagtatttcggtaggtaaagctctatcagcagggaagataatgacggtacctgactaagaagctccggctaa

SEQ ID NO: 7165 - DNA, 490 bp, unidentified
  misc_feature 1..490: note = Ascusbbf_262566, encodes 16S rRNA
  source 1..490: mol_type = genomic DNA
agagtttgatcctggctcaggatgaacgctggcggcatgcctaagacatgcaagtcgtacgaagtgaccctttgaagtggagtgcttgcacaaaacggattaggattttcacttagtggcgcaagggtgagtaacacgtgggtaatctgccttcgagactgggataacaattggaaacgattgctaataccggatgatatatataacacaatgttgtatagtaaaaggagcctttaaagcttcacttgaagatgagcctgcggcgcattagctagttggtaaggtaatggcttaccaaggcaacgatgcgtagccgaactgagaggttgatcggccacattgggactgagacacggcccaaactcctacgggagacagcagttaggaatattcgtcaatgggggaaaccctgaacgagcaatgccgcgtgaatgatgacggtcctttggattgtaaaattctgttgttgaggaagaacggttagtatagg

SEQ ID NO: 7166 - DNA, 490 bp, unidentified
  misc_feature 1..490: note = Ascusbbf_168198, encodes 16S rRNA
  source 1..490: mol_type = genomic DNA
agagtttgatcatggctcagattgaacgctagcgggatgccttacacatgcaagtcgaacggcagcgggaagaaagcttgctttctttgccggcgagtggcgaacgggtgagtaatgtatcggaacgtgcccagtagcgggggataactggccgaaaggtcagctaataccgcatacgccctacgggggaaagggggggactcttcggagcctctcactattggagcggccgatatcggattagctagttggtggggtaatggcctaccaaggcgacgatccgtagctggtttgagaggacgaccagccacactgggactgagacacggcccagactcctacgggaggcagcagtggggaattttggacaatggggggaaccctgatccagccatcccgcgtgtgcgatgaaggccttcgggttgtaaagcacttttgtcagggaagaaaagactatcgataataccggtggtcgatgacggtacctgaa

SEQ ID NO: 7167 - DNA, 490 bp, unidentified
  misc_feature 1..490: note = Ascusbbf_32714, encodes 16S rRNA
  source 1..490: mol_type = genomic DNA
agagtttgatcctggctcaggatgaacgctagcggcaggcttaacacatgcaagtcgaggggcagcatgggagcgtagcaatacattcccgatggcgaccggcgcaagggtgcgtaacgcgtgagcaacttgcccgcatcaggggcataatcggtggaaacgccgtctaactccccataacatagagagtggcatcactttttattgaaatcccaggaggatgcggatgggctcgcgtgacattaggcagttggcggggtaacggcccaccaaaccgacgatgtctaggggaactgagaggttaatcccccacactggaactgagacacggtccagactcctacgggaggcagcagtgaggaatattggacaatggagggaactctgatccagccatgccgcgtgcaggataaggtcctatggattgtaaactgcttttgtatgagagcaataaggatcacgtgtggtccgatgagagtatcatacgaat

SEQ ID NO: 7168 - DNA, 490 bp, unidentified
  misc_feature 1..490: note = Ascusbbf_13568, encodes 16S rRNA
  source 1..490: mol_type = genomic DNA
agagtttgatcatggctcaggatgaacgctagcggcaggcttaacacatgcaagtcgaggggcagcgagtgtagcaatacatgtcggcgaccggcggaagggtgcgtaacgcgtgagcaacatgcccgtgatcgggggatagtcattggaaacgatgcgtaataccccataacaacgaggaccgcatggtccacgtttgaaagcttcggtgatcacggattggctcgcgtggcattagccagtaggcggggtaacggcccacctaagcgacgatgcctaggggttctgagaggaagatcccccacattgggactgagacacggcccaaactcctacgggaggcagcagtgaggaatattggtcaatggacggaagtctgaaccagccatgccgcgtgaaggaaggcggccctatgggttgtaaacttcttttgtagtggagcaataaggtgtacgtgtacaccgatgagagtacattacgaataagcatc

SEQ ID NO: 7169 - DNA, 490 bp, unidentified
  misc_feature 1..490: note = Ascusbbf_89508, encodes 16S rRNA
  source 1..490: mol_type = genomic DNA
agagtttgatcatggctcaggacgaacgctggcggcgtgcctaacacatgcaagtcgagcggggatacagggaacggaggcttcggcggaagggagctgtattccagcggcggacgggtgagtaacgcgtgaatgatctgtcccagacagggggataacacttggaaacaggtgctaataccgcataagaccacgaagctgcatggctaaggggtaaaaggagcgatccggtttggggtgagttcgcgtctgattagctagttggtgaggtaagggcccaccaaggcgacgatcagtagccgacctgagagggtgatcggccacattggaactgagacacggtccaaactcctacgggaggcagcagtgggaatattgggcaatgggcgaaagcctgacccagcaacgccgcgtgagggaagaaggttttcggattgtaaacctctgttgtggatgacgaaggaagtgacggtaatccacaaggaagccc

SEQ ID NO: 7170 - DNA, 490 bp, unidentified
  misc_feature 1..490: note = Ascusbbf_438640, encodes 16S rRNA
  source 1..490: mol_type = genomic DNA
agagtttgatcctggctcaggacgaacgctggcggcgtgcttaacacatgcaagtcgaacgagaggacatgaaaagcttgctttttatggaatcgagtggcaaacgggtgagtaacgcgtaagcaacctgccctgcagatggggacaacagctggaaacggctgctaataccgaatacgaagcagctcccgcatgggggcagcttgaaaggatggcctctgaatatgctatcgctgcaggaggggcttgcgtctgattagctggttggaggggtaacggcccaccaaggcgacgatcagtagccggtctgagaggatgaacggccacattgggactgagacacggcccagactcctacgggaggcagcagtggggaatcttccgcaatggacgaaagtctgacggagcaacgccgcgtgagtgaagacggccttcgggttgtaaagcactttcggaggggaggaacaaatgacgttaccctcagaagaag

SEQ ID NO: 7171 - DNA, 490 bp, unidentified
  misc_feature 1..490: note = Ascusbbf_1233946, encodes 16S rRNA
  source 1..490: mol_type = genomic DNA
agagtttgatcctggctcaggatgaacgctggcggcatgcctaagacatgcaagtcgaacggagtggcctttagaagatggagtgcttgcacaaaatcggacaaagattaccacttagtggcagacgggtgagtaacacgtgggtaatctacctcagggactgggacaacagttggaaacgactgctaataccggatgattcatatttacaaaagtaaatatgctaaaaggggcttcggcctcaccttgtgatgagcttgcggtgtattagctagttggtggggtaatggcctaccaaggcaacgatgcatatccgagctgagaggctgatcggacacattgggactgagacacggcccagactcctacgggagacagcagttaggaatattcgtcaatgggggaaaccctgaacgagcaatgccgcgtgagtgatgacggtcttattgattgtaaaactctgttgtgaaggaagaaaccttatcatagg

SEQ ID NO: 7172 - DNA, 490 bp, unidentified
  misc_feature 1..490: note = Ascusbbf_143770, encodes 16S rRNA
  source 1..490: mol_type = genomic DNA
agagtttgatcctggctcagattgaacgctggcggcatgcctaacacatgcaagtcgaacgggagtagcaatactctagtggcggacgggtgaggaatacgtaggaatttgcccttaagtgggggataacccggggaaacccggattaataccgcatgacctcgaaagagcaaagtgggggatcgcaagacctcacgcttttggagaagcctacgtcggattagctagttggtgaggtaatggctcaccaaggcgacgatccgtaactggtctgagaggatgatcagtcacaccggaactgagacacggtccggactcctacgggaggcagcagtggggaatattggacaatgggcgcaagcctgatccagcaatgccgcgtgtgtgaagaaggccttcgggttgtaaagcactttaagttgggaagaaaaaactcgctctaacacagtgagtcttgacggtaccgacagaataagcaccggctaactct

SEQ ID NO: 7173 - DNA, 490 bp, unidentified
  misc_feature 1..490: note = Ascusbbf_46979, encodes 16S rRNA
  source 1..490: mol_type = genomic DNA
agagtttgatcctggctcaggacgaacgctggcggcgtgcttcatacatgcaagtcgaacgagaagtcaccttcgggtgatggaaagtggcggacgggtgagtaacacgtaggaaatctgccctttagcggggggcaacagttggaaacgactgctaataccccatatgaggtaagctgaaatgcttatcttgaaaactccggtgctaaaggatgagcctgcggctgattagatagttggcggggtaaaggcccaccaagtcgacgatcagtagctggtttgagaggatgatcagccacaatgggactgagacacggcccatactcctacgggaggcagcagtagggaattttgcgcaatgggcgaaagcctgacgcagcaacgccgcgtgaatgttaagcccttcggggtgtaaagttctgtcagtggggacgaaacttgacggtacccacagaggaagcaccggctaactccgtgccagcagccgcgg

SEQ ID NO: 7174 - DNA, 490 bp, unidentified
  misc_feature 1..490: note = Ascusbbf_160957, encodes 16S rRNA
  source 1..490: mol_type = genomic DNA
agagtttgatcatggctcaggatgaacgctggcggcgtgcttaacacatgcaagtcgaacgaagcataacttgtgaatttcttcggattgaagcagttatgactgagtggcggacgggtgagtaacgcgtgggtaacctgccttacacagggggacaacagagggaaacctctgctaataccgcataacccgctagggccgcatggcccggacggaaaagatttatcggtgtaagatggacccgcgtctgattagccagttggcggggtaacggcccaccaaagcgacgatcagtagccgaactgagaggttgaccggccacattgggactgagacacggcccagactcctacgggaggcagcagtggggaatattgcacaatggggggaaccctgatgcagcaacgccgcgtgagtgaagaagtatttcggtatgtaaagctctatcagcagggaagaaaatgacggtacctgactaagaagccccggc

SEQ ID NO: 7175 - DNA, 490 bp, unidentified
  misc_feature 1..490: note = Ascusbbf_178608, encodes 16S rRNA
  source 1..490: mol_type = genomic DNA
agagtttgatcctggctcaggatgaacgctggcggcgtgcttaacacatgcaagtcgaacggaactcctatgaacgaggtttcggccaagtgaataggatgtttagtggcggacgggtgagtaacgcgtgagtaacctgccttggagtggggaataacacagtgaaaattgtgctaataccgcataatgcatttggatcgcatgattctgaatgccaaagatttatcgctctgagatggactcgcgtctgattagctagttggcggggcaatggcccaccaaggcgacgatcagtagccggactgagaggttggccggccacattgggactgagacacggcccagactcctacgggaggcagcagtggggaatattgggcaatgggcgcaagcctgacccagcaacgccgcgtgaaggaagaaggctttcgggttgtaaacttcttttgtcagggacgaagcaagtgacggtacctgacgaataagccac

SEQ ID NO: 7176 - DNA, 490 bp, unidentified
  misc_feature 1..490: note = Ascusbbf_1585314, encodes 16S rRNA
  source 1..490: mol_type = genomic DNA
agagtttgatcctggctcagaacgaacgctggcagcgtggattaggcatgcaagtcgaacgggatccgcgaggtagcaatacttagcggtgagagtggcggattggggaggaacacgtgagcaacctgcctttgggttcgggaaaaccgttggaaacgacggctaataccggatgtggcgcccggcggcatcgccggagcgctaaagggggccgcaaggctcccgccctgagaggggctcgcgcaccatcagctagttggcggggtaacggcccaccaaggcacacggttagctggtctgagaggatgaccagccccactgggactgagatactgcccagactcctacgggaggctgcagtcgaggatcattcgcaatgggcgaaagcctgacgatgcgacgctgcgtggaggatgaaggccttcgggttgtaaactcctgtcatgagggaaaaggcggaggggcccaacacgcccccgagttgatggta

SEQ ID NO: 7177 - DNA, 490 bp, unidentified
  misc_feature 1..490: note = Ascusbbf_8539, encodes 16S rRNA
  source 1..490: mol_type = genomic DNA
agagtttgatcatggctcaggacgaacgctggcggcgtgcctaatacatgcaagtagaacgctgaaagagggagcttgcttcttctggatgagttgcgaacgggtgagtaacgcgtaggtaacctgcctggtagcgggggataactattggaaacgatagctaataccgcataacagttgatttcgcatgaagtcaacttgaaaggaacaattgtttcactaccagatggacctgcgttgtattagctagttggtgaggtaacggctcaccaaggcgacgatacatagccgacctgagagggtgatcggccacactgggactgagacacggcccagactcctacgggaggcagcagtagggaatcttcggcaatgggggcaaccctgaccgagcaacgccgcgtgagtgaagaaggttttcggatcgtaaagctctgttgtaagtcaagaataggtgtgggagtggaaagtccacactatgacggtagct

SEQ ID NO: 7178 - DNA, 490 bp, unidentified
  misc_feature 1..490: note = Ascusbbf_32738, encodes 16S rRNA
  source 1..490: mol_type = genomic DNA
agagtttgatcctggctcagaacgaacgctggtggcgtgtcttatacatgcaagtcgagcgaggcagcaatgccgagcggcgaacgggtgagtaacgcgtaagcaatctgccccgtatcaggaaatacccgtgccaacgcgcggttaatgtccaggagagtggctagctgcatggctagttgactagagatttatcggtacgggatgagcttgcgtccgattagctagttggcggggcaacggcccaccaaggcgacgatcggtagccggcctgagagggtgatcggccacattgggactgagatacggcccagactcctacgggaggcagcagtagggaatattgcacaatggggggaaccctgatgcagcaacgccacgtgtgggaagaagcatttcggtgtgtaaaccactgtcgtgagggaataaggcctgttttaggacaggattgaatgtacctcgaaaggaagcaccggcaaacttcgtgcca

SEQ ID NO: 7179 - DNA, 490 bp, unidentified
  misc_feature 1..490: note = Ascusbbf_25664, encodes 16S rRNA
  source 1..490: mol_type = genomic DNA
agagtttgatcatggctcaggattaacgctggcggcgtgcctaacacatgcaagtcgagcgggaaatttgagagtgaggcttcggcggatctcttaaatggagagcggcggacgggtgagtaacgcgtaggtaacctgccctgcacagagggatagccactggaaacggtgattaatacctcataaaactgttttgccgcatgacagaacagccaaagatttatcggtgcgggatggatctgcgtctgattagctggttggtgaggtaacggctcaccaaggcgacgatcagtagccgacctgagagggtgatcggccacattggaactgagacacggtccaaactcctacgggaggcagcagtggggaatattgcacaatgggcgcaagcctgatgcagcaacgccgcgtgaatgatgaaggcttttgggtcgtaaaattctgttctcagggaagaaaaaaatgactgtacctgaggagaaagccccgg

SEQ ID NO: 7180 - DNA, 490 bp, unidentified
  misc_feature 1..490: note = Ascusbbf_740210, encodes 16S rRNA
  source 1..490: mol_type = genomic DNA
agagtttgatcatggctcaggatgaacgctggcggcgtgcttaacacatgcaagtcgaacgaagcactgaagaatgtcaaagttcttctttgactgagtggcgaacgggtgagtaatgcgtgagcaacctgcccttcagagggggacaacagttggaaacgactgctaataccgcatgacgtgttcggatggcatcatctgaataccaaaggagaaatccgctgagggatgggctcacgtctgattagctagatggcagggtaacggcctaccatggcgacgatcagtagccggactgagaggttgaacggccacattgggactgagatacggcccagactcctacgggaggcagcagtggggaatattgggcaatgggcgaaagcctgacccagcaacgccgcgtgaaggaagaaggccttcgggttgtaaacttcttttaacagggacgaagaagtgacggtacctgttgaataagccacggctaact

SEQ ID NO: 7181 - DNA, 490 bp, unidentified
  misc_feature 1..490: note = Ascusbbf_130542, encodes 16S rRNA
  source 1..490: mol_type = genomic DNA
agagtttgatcctggctcaggatgaacgctggcggcgtgcctaacacatgcaagtcgaacgaagcacaccccttcgggggtgtgactgagtggcggacgggtgagtaacgcgtgggtaacctgccctgtacagggggataacagccagaaatggctgctaataccgcataagcgcacgaagggacatccctttgtgtgaaaaactccggtggtacaggatgggcccgcgtctgattagctggttggcggggtaatggcccaccaaggcgacgatcagtagccggtctgagaggatgaacggccacattggaactgagacacggtccaaactcctacgggaggcagcagtgagggatattgcacaatggggggaaccctgatgcagcaacgccgcgtgagtgaagaagtaattcgttatgtaaagctctatcagcagggaagataatgacggtacctgactaagaagctccggctaaatacgtgccagcag

SEQ ID NO: 7182 - DNA, 490 bp, unidentified
  misc_feature 1..490: note = Ascusbbf_27760, encodes 16S rRNA
  source 1..490: mol_type = genomic DNA
agagtttgatcatggctcaggataaacgctggcggcgtgcctaatacatgcaagtcgatcgctggagttctagcttgctagaatgaaggagaggcgaacgggtgagtaatacataagcaacctgcccacgaagactgggataattcctggaaacggggactaataccggataggcagcttgatcgcatgatcgagctgttaaagattcaaagcactggtggatgggcttatggcgcattagctagttggtgaggtaacggctcaccaaggcgatgatgcgtagccggcctgagagggtgaacggccacattgggactgagacacggcccagactcctacgggaggcagcagtagggaattttcggcaatgggcgaaagcctgaccgagcaacgccgcgtgagtgaagacggccttcgggttgtaaagctctgttgtaagggaagaacactgttgagagaatcggcagctgacggtaccttaccagaaagc

SEQ ID NO: 7183 - DNA, 490 bp, unidentified
  misc_feature 1..490: note = Ascusbbf_28523, encodes 16S rRNA
  source 1..490: mol_type = genomic DNA
agagtttgatcatggctcaggatgaacgctggcggcgtgcctaacacatgcaagtcgaacgaagcaagagagcttgctctcttgacttagtggcggacgggtgagtaacgcgtgagtaacctgcccttcagagggggacaacagttggaaacgactgctaataccgcataagaccacgctaccgcatggtagaggggtcaaaggagcaatccgctgaaggatggactcgcgtccgattagatagttggtgaggtaacggcccaccaagtcgacgatcggtagccggactgagaggttgaacggccacattgggactgagacacggcccagactcctacgggaggcagcagtgagggatattgcacaatgggcgaaagcctgatgcagcaacgccgcgtgaaggatgaaggttttcggattgtaaacttcttttctcattgacgaattcttgacggtagatgaggaataagccacggctaactacgtgcca

SEQ ID NO: 7184 - DNA, 490 bp, unidentified
  misc_feature 1..490: note = Ascusbbf_81232, encodes 16S rRNA
  source 1..490: mol_type = genomic DNA
agagtttgatcatggctcaggatgaacgctagctacaggcttaacacatgcaagtcgaggggcagcgcgcggaggcttcggccactgtggcggcgaccggcgaatgggtgagtaacacgtatccaacctgcccgtcactgggggatagccctccgaaaggagaattaacaccccatgattgcatttgaggcatcttttatgcattaaaggttacggtgacggatggggatgcgtccgattagctagtcggcggggtaacggcccaccgaggcgacgatcggtagggggtctgagaggatggtcccccacactggaactgagacacggtccagactcctacgggaggcagcagtgaggaatattggtcaatgggcgagagcctgaaccagccaagtagcgtgaaggatgacggccctacgggttgtaaacttcttttatgcgggaataaagttcgccacgtgtggcgttttgcatgtaccgcaagaaaaag

SEQ ID NO: 7185 - DNA, 490 bp, unidentified
  misc_feature 1..490: note = Ascusbbf_361538, encodes 16S rRNA
  source 1..490: mol_type = genomic DNA
agagtttgatcctggctcaggatgaacgctagctacaggcttaacacatgcaagtcgaggggtaacgacagcgaaagcttgcttttgctgggcgacgaccggcgaatgggtgagtaacgcgtatccaacctgccgcaaagtagggcacagccttgcgaaagtaagattaatgccctatgtgctgtgatgatgacatcagaattgcagtaaaggttcaccgctttgcgatggggatgcgtctgattaggcagttggtgaggtaacggcccaccaaacctacgatcagtagccggtctgagaggatgaacggccacactggaactgagacacggtccagactcctacgggaggcagcagtggggaatcttccgcaatgggcgaaagcctgacggagcaacgccgcgtgagtgatgacggccttcgggttgtaaagctctgtgatcggggacgaacggtccgtaagctaataccttatggaagtgacggtacc

SEQ ID NO: 7186 - DNA, 490 bp, unidentified
  misc_feature 1..490: note = Ascusbbf_321255, encodes 16S rRNA
  source 1..490: mol_type = genomic DNA
agagtttgatcatggctcaggatgaacgctggcggcatgcctaagacatgcaagtcgaacgaggtggcccagaaatatttattgaagtatgaagtgcttgcactgattatggatttatttggctctggattctccacctagtggcaaacgggtgagtaacacgtgggttacctacctccaagttggggataacagttggaaacgactgataataccgaatgtgctctacggagtaaagaagcccttaaagcttcgcttagagatgggcctgcggcgtattagctagttggtgggataacggcctaccaaggcaacgatgcgtagccgaactgagaggttgatcggccacactgggactgagacacggcccagactcctacgggagacagcagttaggaatattcgtcaatgggggaaaccctgaacgagcaatgccgcgtgaacgatgacggccctatgggttgtaaagttctgttgtttggaaagaact

SEQ ID NO: 7187 - DNA, 490 bp, unidentified
  misc_feature 1..490: note = Ascusbbf_216181, encodes 16S rRNA
  source 1..490: mol_type = genomic DNA
agagtttgatcctggctcaggatgaacgctggcggcgtgcctaacacatgcaagtcgaacggagtacagacgctgtgagaggaagtgcttgcacagacttgaacttgtttgtacttagtggcggacgggtgagtaacgcgtggaaaacctgcctcatacagggggataacagggagaaattcctgctaataccgcataagcgcacggaaccgcatggttcagtgtgaaaagatttatcggtatgagatggttccgcgtctgattagccggttggcggggtaacggcccaccaaagcagcgatcagtagccggcctgagagggcggacggccacattgggactgagacacggcccagactcctacgggaggcagcagtgggggatattgcacaatgggggaaaccctgatgcagcgacgccgcgtgggtgaagaagtatttcggtatgtaaagccctatcagcagggaagatgatgacggtacctgactaa

SEQ ID NO: 7188 - DNA, 490 bp, unidentified
  misc_feature 1..490: note = Ascusbbf_343776, encodes 16S rRNA
  source 1..490: mol_type = genomic DNA
agagtttgatcctggctcaggacgaacgctggcggcgtgcctaacacatgcaagtcgaacggggctactacgacggaaggcttcggctggaagatgttttagcttagtggcggacgggtgagtaacgcgtgagcaacctgccttacagagggggacaacagttggaaacgactgctaataccgcataaagtattgagagggcatccttttgataccaaagatttatcgctgtaagatgggctcgcgtatgattagatagttggtgaggtaacggctcaccaagtcgacgatcattagccggactgagaggttgaacggccacattgggactgagatacggcccagactcctacgggaggcagcagtggggaatattgcgcaatgggggcaaccctgacgcagcaacgccgcgtgaaggatgaaggttttcggattgtaaacttcttttgtcaaggacgaagaaagtgacggtacttgacgaataagctcc

SEQ ID NO: 7189 - DNA, 490 bp, unidentified
  misc_feature 1..490: note = Ascusbbf_478085, encodes 16S rRNA
  source 1..490: mol_type = genomic DNA
agagtttgatcatggctcagaacgaacgctggcggcgtggattaggcatgcaagtcgaacgggactttgctttgtagcaatactttgcaaagtctagtggcgtaagggtgagtaacacgtgggtaatgtacccgatagtttgggataacgttccgaaagggacgctaataccggatgtgatgttaaaccgccgggtttaacaagaaaggtggggaccgcaaggcctgccgctaacggaacggcccgcgacctattagctagttggtggggtaaaggcctaccaaggcgaggatgggtagccgaactgagaggttgaccggccacactgggactgagacactgcccagacttctacggaaggctgcagtcgagaatcattcacaatggacgaaagtctgatgatgcgacgccgcgtgcgcgatgaaggtcttcggattgtaaagcgctttgaacagggaagaatgccgcgtatttaatagataacgcggag

SEQ ID NO: 7190 - DNA, 488 bp, unidentified
  misc_feature 1..488: note = Ascusbbf_13188, encodes 16S rRNA
  source 1..488: mol_type = genomic DNA
agagtttgatcatggctcaggattaacgctggcggcgtgcctaatacatgcaagtcgaatggtagcaataccatggcgaacgggtgagtaacacgtaggtaacctgtctttaagccgaggataaccattggaaacgatggataatactggataggacatttgaaggcatctttagatgtttaaagatttatcacttagagaggggcctgcggcgcattagctagttggtgaggtgaaggcttaccaaggcgatgatgcgtagccggactgagaggttgaacggccacaatggaactgagaacggtccatactcctacgggaggcagcagtagggaattttcggcaatgggcggaagcctgaccgagcaacgccgcgtgaacgaagaagtatttcggtatgtaaagttcttttattagggacgaaaagacagattgacggtacctaatgaataagctccggctaactacgtgccagcagccgcggtaat

SEQ ID NO: 7191 - DNA, 490 bp, unidentified
  misc_feature 1..490: note = Ascusbbf_35755, encodes 16S rRNA
  source 1..490: mol_type = genomic DNA
agagtttgatcatggctcaggatgaacgctagcggcaggcctaacacatgcaagtcgaggggtaacagggcgtagcaatacgccgctgacgaccggcgcacgggtgcgtaacgcgtatgcaacctgcccgtaacaggggaataacggggagaaatctccactaatgccccatattcttgctggttcgcatgttccggcaaggaaagctttctgtggttacggatgggcatgcgtgacattagctagttggtaaggtaacggcttaccaaggcgtcgatgtctaggggagctgagaggctaatcccccacactggtactgagacacggaccagactcctacgggaggcagcagtgaggaatattggtcaatggagggaactctgaaccagccatgccgcgtgagggaggaaggccctacgggtcgtaaacctcttttgccccggggcaataagggccgtgcgcggtccgatgagagtacggggcgaataag

SEQ ID NO: 7192 - DNA, 490 bp, unidentified
  misc_feature 1..490: note = Ascusbbf_32659, encodes 16S rRNA
  source 1..490: mol_type = genomic DNA
agagtttgatcctggctcaggataaacgctggcggcgtgcctaatacatgcaagtcgagcgaggtattcagcaatggataccgagcggcgaacgggtgagtaacacgttgggaacctaccctcctgatcggaatacccaagggaaactttggttaatgccgaatacgtggttccgggataacctggagtcataaaaggcggccttaaagccgcgcagaaggatggacctgcggcgcattagctagtaggtgagataatagcccacctaggcgaggatgcgtagccgacctgagagggtgaacggccacactggaactgagacacggtccagactcctacgggaggcagcagtagggagtattcggcaatgggggaaaccctgaccgagcaacgccgcgtgaatgatgacggccttcgggttgtaaaattctgtggcgaggaacgaatggcaaggagaggaaatgctctttgtttgacggtacctcgctag

SEQ ID NO: 7193 - DNA, 490 bp, unidentified
  misc_feature 1..490: note = Ascusbbf_163586, encodes 16S rRNA
  source 1..490: mol_type = genomic DNA
agagtttgatcctggctcaggatgaacgctagcggcaggcttaacacatgcaagtcgaggggcagcgcgggagtagcaatacttctggcggcgaccggcgcaagggtgcgtaacgcgtgagcaacatacccgtcacagggggataagcgatggaaacgtcgtctaataccgcataacaccaggagcgacatcgtttctggttgaaacttacgagggtgacggattggctcgcgagacattagctagtcggcggggtaacggcccaccgaggcgacgatgtctaggggttctgagaggaaggtcccccacactggaactgagacacggtccagactcctacgggaggcagcagtgaggaatattggacaatggtcggaagactgatccagccatgccgcgtgcaggaagacggtcctatggattgtaaactgcttttgtacgggagcaataagtgccacgtgtgacacgatgagagtaccgtacgaataag

SEQ ID NO: 7194 - DNA, 490 bp, unidentified
  misc_feature 1..490: note = Ascusbbf_1792748, encodes 16S rRNA
  source 1..490: mol_type = genomic DNA
agagtttgatcatggctcaggatgaacgctagcgacaggcttaacacatgcaagtcgaggggcagcatgagggtagcaataccttcgatggcgaccggcacactggtgagtaacacgtatgcaacctgcccttgtcagggggataatccggggaaacccggtctaataccgcataacacctttgggggcctcccctttggttgaaagatacgtcggacagggatgggcatgcgcagcattagcttgttggtggggcgacggcccaccaaggcgacgatgcttaggggttctgagaggaaggtcccccacactggtactgagacacggaccagactcctacgggaggcagcagtgaggaatattggtcaatggccgcagggctgaaccagccaagtcgcgtgagggaagacggccctacgggttgtaaacctcttttgccggggagtaaagtgcgggatgcgtcccgtattgcgagtacccggagaaaaag

SEQ ID NO: 7195 - DNA, 490 bp, unidentified
  misc_feature 1..490: note = Ascusbbf_7657, encodes 16S rRNA
  source 1..490: mol_type = genomic DNA
agagtttgatcatggctcaggatgaacgctagcgacaggcctaacacatgcaagtcgaggggcagcgcggagtagcaatactttggcggcgaccggcgcacgggtgcgtaacaggtgtgcaatctgtccatagtcgggggatagcccggcgaaagccgaattaatactccatgtgtcatttagccgcatgactggatgatgaaacgtaaggactatgggtgagcacgcttctgattaggtagttggtgaggtaacggcccaccaagccgacgatcagtaggggttctgagaggaaggtcccccacattggaactgagacacggtccaaactcctacgggaggcagcagtgaggaatattggtcaatggacgagagtctgaaccagccaagtcgcgtgaaggatgaaggttctatggattgtaaacttcttttgtccgagggtaaagtgtgggacgtgtcccatttggcaagtatcggacgaataagcatc

SEQ ID NO: 7196 - DNA, 490 bp, unidentified
  misc_feature 1..490: note = Ascusbbf_11503, encodes 16S rRNA
  source 1..490: mol_type = genomic DNA
agagtttgatcatggctcagaacgaacgctggcggcgcgtcttaagcatgcaagtcgagcgggattacggtgcttgcaccgtatgagagcggcggactggtgagtaacgcgtgggtgacgtaccctccggactgggatagctcctagaaataggaggtaataccggatacggtgcctgctgtcagagggcaggcaggaaaggttcttttgaaccgccgggggagcggcccgcgtgccattagctagttggtggggtaacggcctaccaaggcagtgatggctacccggcctaagagggtggacgggcacattgggactgagatacggcccagactcctacgggaggcagcagctaagaatattccgcaatgggggaaaccctgacggagcgacgccgcgtggacgatgaaggccggaaggttgtaaagtccttttatgactgatgaataagggatgtgagagaaacgcattctggtgacggtaggtcatg

SEQ ID NO: 7197 - DNA, 490 bp, unidentified
  misc_feature 1..490: note = Ascusbbf_11183, encodes 16S rRNA
  source 1..490: mol_type = genomic DNA
agagtttgatcatggctcaggacgaacgctggcggcgtgcctaacacatgcaagtcgagcgagagagtcccttcggggacaatctagcggcggacgggtgagtaacacgtgggtaacctgcctcaaagagggggatagcctcccgaaagggagattaataccgcataagacctggattcacatggatccgggatgaaaggagaaatccgctttgagatggacccgcggcgcattagctagttggtggggtaaaggcctaccaaggcagcgatgcgtagccgacctgagagggtgatcggccacattggaactgagagacggtccagactcctacgggaggcagcagtggggaatattgcacaatgggcgaaagcctgatgcagcaacgccgcgtgagtgatgaaggttttcggatcgtaaagctctgtcttctgggaagataatgacggtaccagaggaggaagccacggctaactacgtgccagcagcc

SEQ ID NO: 7198 - DNA, 490 bp, unidentified
  misc_feature 1..490: note = Ascusbbf_479669, encodes 16S rRNA
  source 1..490: mol_type = genomic DNA
agagtttgatcatggctcaggatgaacgctagctacaggcctaacacatgcaagtcgaggggcagcatgtcggtagcttgctaccgatgatggcgaccggcgaatgggtgagtcacgcgtgtccaacctgccccccgcccggggatagcccttggaaatgaggattaagacccgatacgtggcgtttccgcatggcggcgccatgaaacgaggcgggggatggggacgcgtcggattagcttgacggcggggcaacggcccaccgtggcgacgatccgcaggggttctgagaggaaggtcccccacactggcactgagacacgggccagactcctacgggaggcagcagtgaggaatattggtcaatggccgagaggctgaaccagccaagtagcgtgcaggatgacggccctacgggttgtaaactgcttttgcgggaggataaagtgcgctacgtgtagcgctttgcaggtatcccgtgaataaggac

SEQ ID NO: 7199 - DNA, 490 bp, unidentified
  misc_feature 1..490: note = Ascusbbf_1751033, encodes 16S rRNA
  source 1..490: mol_type = genomic DNA
agagtttgatcatggctcaggatgaacgctggcggcacgcttaacacatgcaagtcgagcggagttatgacttcggtcataacttagcggcggacgggtgagtaacacgtgggtaacctaccccatacagggggataacgtatagaaatgtacgctaataccgcataagccaacagggaggcatcttctggttggaaaagcgctagtggtatgggatgggcccgcgactgattagctagttggtgaggtaagagcccaccaaggcaacgatcagtagccggtctgagaggatggacggccacattgggactgagacacggcccagactcctacgggaggcagcagtggggaatattgcacaatggggggaaccctgatgcagcgatgccgcgtgaaggaagaagtatttcggtatgtaaacttctatcagcagggaagaaaaaggacagtacctgaataagcagccccggctaactacgtgccagcagcc

SEQ ID NO: 7200 - DNA, 484 bp, unidentified
  misc_feature 1..484: note = Ascusbbf_3105, encodes 16S rRNA
  source 1..484: mol_type = genomic DNA
agagtttgatcctggctcagaacgaacgctggcggcaggtcttaggcatgcaagtcgaacgagtgaagcagggcttgccctgtggagcgagtggcgcacgagtgagtaacgcgtgggaaactgcccaccactggggaataacgtttggaaacgaacgctaataccgcatacgccggaaacgggaaagatttatcggtggtggatgtgcccgcgttggattagcttgttggtggggtaatggcctaccaaggcgatgatccatagctggtctgagaggacgatcagccacgttggaactgagacacggtccaaactcctacgggaggcagcagctaagaatattgggcaatggaggaaactctgacccagccatgccgcgtgaatgaagaaggccttcgggttgtaaagttcttttaatcgtgaagatgatgacagtagcgatagaaaaagcaccggctaacttcgtgccagcagccgcggtaat

SEQ ID NO: 7201 - DNA, 353 bp, unidentified
  misc_feature 1..353: note = Ascusbbf_143765, encodes 16S rRNA
  source 1..353: mol_type = genomic DNA
agagtttgatcatggctcagaacgaacgctggcggcgcgttttaagcatgcaagtcgagcggtagtagcaatacgagagcggcggacgggtgagtaacacgtgggtaatctgcccttcggtcgggaatagcctgtggaaacacaggataataccggatgcgatggtcttcacacaagtggaggtcaggaaaggagccaaggctccgccggaggatgagcccgcgtcccattagctagatggtgaggtaaaggcccaccatggcgatgatgggtagccggcctgagagggtgaacggccacattggaactgagacacggtccagactcctacgggagccagcagccgcggtaat

SEQ ID NO: 7202 - DNA, 490 bp, unidentified
  misc_feature 1..490: note = Ascusbbf_42691, encodes 16S rRNA
  source 1..490: mol_type = genomic DNA
agagtttgatcatggctcaggatgaacgctggcggcgtgcttaacacatgcaagtcgaacgaagcattttggttgaagttttcggacagataccgatctgactgagtggcggacgggtgagtaacgcgtgggcaacctgccgtatgcagggggataacagttggaaacgactgctaataccgcataagcgcacagtaccgcatggtacagtgtgaaaagccgagacggcatacgatgggcccgcgttggattaggcagttggtgaggtaacggcccaccaagccgacgatccatagccgacctgagagggtgaccggccacattgggactgagacacggcccaaactcctacgggaggcagcagtggggaatattgcacaatgggggaaaccctgatgcagcgacgccgcgtgagtgaagaagtatttcggtatgtaaagctctatcagcagggaagaagatgacggtacctgcacaagaagccccggct

SEQ ID NO: 7203 - DNA, 490 bp, unidentified
  misc_feature 1..490: note = Ascusbbf_1506469, encodes 16S rRNA
  source 1..490: mol_type = genomic DNA
agagtttgatcatggctcaggatgaacgctggcggcgtgcttaacacatgcaagtcgaacgaggattgtcggttgaagttttcggacggaaactggcaataccgagtggcggacgggtgagtaacgcgtggggaacctgccccattccgggggataccagttggaaacgactgttaataccgcataagcgcacggcatcgcatgatgcagtgtgaaaaactgaggtggaatgggatggccccgcgtctgattagccagttggcagggtaacggcctaccaaagcgacgatcagtagccggcctgagagggcgaccggccacattgggactgagacacggcccaaactcctacgggaggcagcagtggggaatattgcacaatgggggaaaccctgatgcagcgacgccgcgtgagtgaagaagtatttcggtatgtaaagctctatcagcagggaagaaaaaaatgacggtacctgactaagaagccccg

SEQ ID NO: 7204 - DNA, 485 bp, unidentified
  misc_feature 1..485: note = Ascusbbf_718627, encodes 16S rRNA
  source 1..485: mol_type = genomic DNA
agagtttgatcatggctcagaacgaacgctggcggcacgcttaacacatgcaagtcggacgggtggaaggtggtttaccattggaagctagtggcggactggtgagtataatacaggaatatgcccttaggtatgggatagctttgggaaactggaggtaataccgtataaggtcgagagaggaaagcaggaatgcgcctgaggattagcctgtatctgattaggaagttggcggggtaaaggcccaccaatccagagatcagtagctgttctgagaggaagatcagccacattgggactgagatacggcccagactcctacgggaggcagcagtggggaatattggacaatggggggaaccctgatccagcgatgccgcgtgaatgaagaaggttttcggattgtaaagttcttttcttagggaagatgatgacggtacctgaggaataagcaccggcaaactctgtgccgcagccacggtaat

SEQ ID NO: 7205 - DNA, 490 bp, unidentified
  misc_feature 1..490: note = Ascusbbf_66006, encodes 16S rRNA
  source 1..490: mol_type = genomic DNA
agagtttgatcctggctcaggatgaacgctggcggcgtgcctaacacatgcaagtcgaacgaggctcttttctcagatgtttcgactgaagagaaaagatcaccgagtggcggatgggtgagtaacgcgtggagaacctgcccttatcagggggataacaactggaaacggttgacaataccgcatatagtgcttgatcgcatgttcttgcacggaaagatttatcggataaggatggctccgcgttggattagctggttggtggggtaacggcctaccaaggcgacgatccatagccggcctgagagggcgaccggccacattgggactgagacacggcccagactcctacgggaggcagcagtggggaatattgcacaatgggcgcaagcctgatgcagcgacgccgcgtggaggaagaagtatttcggtatgtaaactcctatcagcagggaagaaaatgacggtacctgactaagaagccccggct

SEQ ID NO: 7206 - DNA, 490 bp, unidentified
  misc_feature 1..490: note = Ascusbbf_233413, encodes 16S rRNA
  source 1..490: mol_type = genomic DNA
agagtttgatcctggctcaggatgaacgctagcgacaggcttaacacatgcaagtcgaggggcagcatgatttgtagcaatacagattgatggcgaccggcgcacgggtgagtaacgcgtatgcaacttacctatcagagggggatagcccggcgaaagtcggattaataccccataaaacaggggtcccgcatgggaatatttgttaaagattcatcgctgatagataggcatgcgttccattaggcagttggcggggtaacggcccaccaaaccgacgatggataggggttctgagaggaaggtcccccacattggtactgagacacggaccaaactcctacgggaggcagcagtgaggaatattggtcaatggccgagaggctgaaccagccaagtcgcgtgaaggaagaaggatctatggtttgtaaacttcttttataggggaataaagtggaggacgtgtccttttttgtatgtaccctatgaa

SEQ ID NO: 7207 - DNA, 490 bp, unidentified
  misc_feature 1..490: note = Ascusbbf_35691, encodes 16S rRNA
  source 1..490: mol_type = genomic DNA
agagtttgatcatggctcaggacgaacgctggcggcatgcctaacacatgcaagtcgaacggagcagttccttcggggactacttagtggcgaacgggtgagtaacgcgtgagcaacctgcctcggcgagggggataacacttggaaacaggtgctaataccgcataagaccacactgtcgcatgacagaggggtcaaaggagcaatccgcgctgagaggggctcgcgtcccattaggtagatggcgggataacagcccaccatgccgacgatgggtagccgagctgagaggctgatcggccacactggaactgagacacggtccagactcctacgggaggcagcagtggggaatattgggcaatgggcgaaagcctgacccagcaatgccgcgtgagggaagaaggtcttcggattgtaaacctctgtccttggtgacgaaggaagtgacggtagccaaggaggaagccccggctaactacgtgccagc

SEQ ID NO: 7208 - DNA, 490 bp, unidentified
  misc_feature 1..490: note = Ascusbbf_83884, encodes 16S rRNA
  source 1..490: mol_type = genomic DNA
agagtttgatcctggctcaggatgaacgctggcggcgtgcctaacacatgcaagtcgaacgaggtcatttgttcttgcgattcgtcaagagaactcctgaccgagtggcggatgggtgagtaacgcgtggagaacctgccctcatctgggggataacaactggaaacggttgacaataccgcatagactctgatgctcgcatgagcgtaagagaaaagatttatcggatgaggatggctccgcgtcggattagccagttggcggggtaacggcccaccaaagcgacgatccgtagccggcctgagagggcgaccggccacattgggactgagacacggcccagactcctacgggaggcagcagtggggaatattgcacaatgggcgcaagcctgatgcagcgacgccgcgtgagtgatgaagtgcttcggcatgtaaagctctatcaacagggaagaaaatgacggtacctgaataagaagccccggcta

SEQ ID NO: 7209 - DNA, 490 bp, unidentified
  misc_feature 1..490: note = Ascusbbf_1878589, encodes 16S rRNA
  source 1..490: mol_type = genomic DNA
agagtttgatcatggctcaggatgaacgctggcggcatgcctaagacatgcaagtcgaacggagtgaccctttgaagttggagtgcttgcacaaagatggatttggattttcactcagtggcagacgggtgagtaacgcgtgggtaatctaccttaaagactgggataacttctggaaacggatgctaataccggataaaccataattagataattagttatgttgaaaggagcttcggcttcactttgagatgagcttgcgttgtattagctagttggtggggtaatggcctaccaaggcaacgatgcatatccgagctgagaggctgatcggacacattgggactgagacacggcccagactcctacgggagacagcagttaggaatattcgtcaatgggggaaaccctgaacgagcaatgccgcgtgaatgatgacaatcctctggattgtaaaattctgttgtaaaggacgaacccttatcatagg

SEQ ID NO: 7210 - DNA, 490 bp, unidentified
  misc_feature 1..490: note = Ascusbbf_1547221, encodes 16S rRNA
  source 1..490: mol_type = genomic DNA
agagtttgatcatggctcagaatcaacgctggcggcgtgcctaatacatgcaagtcgtacgcgaagaccccgcaaggggttggtagcgtggcaaacgggtgagtaacgcgtgggcgacctgccttcgagtgggggataaccttccgaaaggggggctaataccgcatgacataccgtgtttagatacacggatatcaaagccggggatcgcaagacctggcgcttgaagaggggcctacgtccgattagctagttggtggggtaacggctcaccaaggcgacgatcggtatccggcctgagagggcggacggacaaactgggactgagacacggcccagactcctacgggaggcagcagtagggaattgttcgcaatgggcgcaagcctgacgacgcaacgccgcgtggaggatgaagggcttcggctcgtaaactcctttcgaccgagatgaatatccatggggctaatatccctgtggactgacagta

SEQ ID NO: 7211 - DNA, 490 bp, unidentified
  misc_feature 1..490: note = Ascusbbf_102359, encodes 16S rRNA
  source 1..490: mol_type = genomic DNA
agagtttgatcatggctcaggacgaacgctggcggcgtgcctaatacatgcaagtcgagcggggtccaaccagtggcaacactggggacgacctagcggcgaacgggtgagtaacacgtgaggaacctgccccgaagtctgggataactcgaggaaactcgtgctaataccggatgcctccaccagatcgcatggtcaggtggagaaagttttttcgcttcgggagggcctcgcggcctatcagcttgttggtggggtaacggcctaccaaggcatcgacgggtagctggtctgagaggacgatcagccacactgggactgagacacggcccagactcctacgggaggcagcagtagggaatcttgcgcaatgggcgaaagcctgacgcagcaacgccgcgtgggggatgaaggctctcgggttgtaaacccctttcagcagggacgaaattgacggtacctgcagaagaagccccggccaactacgtgc

SEQ ID NO: 7212 - DNA, 490 bp, unidentified
  misc_feature 1..490: note = Ascusbbf_473024, encodes 16S rRNA
  source 1..490: mol_type = genomic DNA
agagtttgatcctggctcagattgaacgctggcggaatgctttacacatgcaagtcgagcggcagcgcggggcaacctggcggcgagcggcgaacgggtgagtaatacatcggaacgtgcccagatgtgggggataactacttgaaagagtggctaataccgcatgtgatctgaggatgaaagcgggggacctttgggcctcgcgcatttggagcggccgatggcagattaggttgttggtggggtaaaggcttaccaagcctgtgatctgtagctggtctgagaggacgaccagccacactgggactgagacacggcccagactcctacgggaggcagcagtggggaattttggacaatgggcgaaagcctgatccagccattccgcgtgcaggatgaaggccctcgggttgtaaactgcttttgtacggaacgaaaaggctttctctaatacaggaagttgatgacggtaccgtaagaataagcaccg

SEQ ID NO: 7213 - DNA, 490 bp, unidentified
  misc_feature 1..490: note = Ascusbbf_851, encodes 16S rRNA
  source 1..490: mol_type = genomic DNA
agagtttgatcatggctcaggatgaacgctggcggcgtgcctaacacatgcaagtcgaacggaactgcttttgaagattccttcgggatgattcagttgtagtttagtggcggacgggtgagtaacgcgtgagtaacctgcccttcagagggggataacgatctgaaaagaccgctaataccgcataacattacgaagtcgcatggctttgtaatcaaaactcaggtgctgaaggatggactcgcgtccgattagttagttggtgaggtaacggcccaccaagaccgcgatcggtagccggactgagaggttgaacggccacattgggactgagacacggcccagactcctacgggaggcagcagtgggggatattgcgcaatgggggaaaccctgacgcagcaacgccgcgtggatgatgacggttttcggattgtaaagtccttttgttggggacgaagattgacggtacccaacgaataagctccgg

SEQ ID NO: 7214 - DNA, 490 bp, unidentified
  misc_feature 1..490: note = Ascusbbf_230048, encodes 16S rRNA
  source 1..490: mol_type = genomic DNA
agagtttgatcctggctcaggacgaacgctggcggcgtgcttaacacatgcaagtcgaacgaagttgctctttgggaagccctcgggtggaactgtgagtatacttagtggcggacgggtgagtaacgcgtgagcaatctgccctgcaatgggggacaacagttggaaacgactgctaataccgcataagaccacgaaaccgcatggtttagaggtaaaaggattcattcgatgcaggatgagctcgcgtcccattagatagttggtgaggtaacggcccaccaagtcaacgatgggtagccgacctgagagggtgatcggccacattggaactgagaaacggtccaaactcctacgggaggcagcagtggggaatattgggcaatgggggaaaccctgacccagcaacgccgcgtgaaggaagaaggccttcgggttgtaaacttttgtcctatgggacgaaaaaaatgacggtaccataggaggaagc

SEQ ID NO: 7215 - DNA, 490 bp, unidentified
  misc_feature 1..490: note = Ascusbbf_1525997, encodes 16S rRNA
  source 1..490: mol_type = genomic DNA
agagtttgatcatggctcaggacgaacgctggcggcgcgcctaacacatgcaagtcgaacggagtttatccgactgaagttttcggatggaagatggataaacttagtggcggacgggtgagtaacacgtgagcaacctgcctttcagagggggataacgattggaaacgatcgctaataccgcataacattatgaggagacatcttcttataatcaaaggagcaatccgctgaaagatgggctcgcggccgattagctagatggtggggtaacggcccaccatggcgacgatcggtagccggactgagaggttgaacggccacattgggactgagacacggcccagactcctacgggaggcagcagtgggggatattgcacaatggaggaaactctgatgcagcgacgccgcgtgagggaagacggtcttcggattgtaaacctctgtcttaggggaagaaaatgacggtaccctaagaggaagctccg

SEQ ID NO: 7216 - DNA, 490 bp, unidentified
  misc_feature 1..490: note = Ascusbbf_74709, encodes 16S rRNA
  source 1..490: mol_type = genomic DNA
agagtttgatcatggctcaggatgaacgctggcggcgtgcttaacacatgcaagtcgaacgaggaataattgatgagatcttcggatggatttagttattccgagtggcggacgggtgagtaacgcgtgggtaacctgccccatacagggggacaacagagggaaacttctgctaataccgcataagcgctttttatggcatcgtaagaagcggaaagctccggcggtatgggatgggcccgcgttggattaggcagttggcggggtaacggcccaccaaaccgacgatccatagccgacctgagagggtgaccggccacattgggactgagacacggcccagactcctacgggaggcagcagtggggaatattgcacaatgggcgaaagcctgatgcagcgacgccgcgtgagtgaagaagtatttcggtatgtaaagctctatcagcagggaagaagatgacggtacctgcacaagaagctccggcta

SEQ ID NO: 7217 - DNA, 490 bp, unidentified
  misc_feature 1..490: note = Ascusbbf_41747, encodes 16S rRNA
  source 1..490: mol_type = genomic DNA
agagtttgatcctggctcaggattaacgctggcggcgcacataagacatgcaagtcgaacggacttaatcgattcttttagattcgaagcggttagtggcggactggtgagtaacacgtaagtaacctgcctatcagaggggaataacagtgagaaatcattgctaataccgcataagctgacagtatcgcatgataccgttagaaaaggagcaatccgctgatagatggacttgcggccgattagccagttggtggggtaacggcctaccaaagcaacgatcggtagccgagctgagaggctcaacggccacattgggactgagatacggcccagactcctacgggaggcagcagtcgggaatattgcgcaatggaggaaactctgacgcagtgacgccgcgtataggaagaaggttttcggattgtaaactattttagacagggaagaaattgacagtacctgtagaataagctccggctaactacgt

SEQ ID NO: 7218 - DNA, 490 bp, unidentified
  misc_feature 1..490: note = Ascusbbf_34875, encodes 16S rRNA
  source 1..490: mol_type = genomic DNA
agagtttgatcatggctcaggatgaacgctggcggcgtgcctaacacatgcaagtcgaacgggaactccgagatgaagtttcgatggattcttggaaattctagtggcggacgggtgagtaacgcgtgggtaacctgcccttaagaggtgaataacaatgagaaatcagtgctaatacaccatatgcttacaagtatcgcatgatatagtgaggaaagaatttcgcttaaggatggacccgcgtttgattagccagttggcagggtaacggcctaccaaagcaacgatcaatagccggcctgagagggtgaacggccacattggaactgagacacggtccaaactcctacgggaggcagcagtggggagtattgcacaatgggcgcaagcctgatgcagcaacgccgcgtgagtgaagaagtatttcggtatgtaaagctctatcgatggggaataagatgaaggtacccaagtaagaagccccggctaa

SEQ ID NO: 7219 - DNA, 490 bp, unidentified
  misc_feature 1..490: note = Ascusbbf_1870312, encodes 16S rRNA
  source 1..490: mol_type = genomic DNA
agagtttgatcatggctcaggatgaacgctggcggcgtgcttaacacatgcaagtcgaacggacttatttgagagcttgctcccaaataagttagtggcggacgggtgagtaacgcgtgggtaacctgccgtatgccgggggacaacagttggaaacgactgctaataccgcataagcgcacagagtggcatcactcagtgtgaaaaactccggtggcatacgatggacccgcgtctgattaggcagttggcgaggtaacggctcaccaaacctacgatcagtagccggcctgagagggtgaacggccacattgggactgagacacggcccaaactcctacgggaggcagcagtggggaatattgcacaatgggggaaaccctgatgcagcgacgccgcgtgagtgaagaagtatttcggtatgtaaagctctatcagcaggaaagaaaatgacggtacctgactaagaagccccggctaactacgtgcc

SEQ ID NO: 7220 - DNA, 490 bp, unidentified
  misc_feature 1..490: note = Ascusbbf_270837, encodes 16S rRNA
  source 1..490: mol_type = genomic DNA
agagtttgatcatggctcaggatgaacgctagcgggaggcctaacacatgcaagccgagcggtatttattcttcggaatagagagagcggcgtacgggtgcgtaacacgtgtgcaacctgcctttatctgggagatagccctccgaaagggggattaatattccataatatctcgttgggcatccaacgagattgaaagctccggcggatagagatgggcacgcgcaagattagatagttggtgaggtaacggctcaccaagtctgcgatctttagggggcctgagagggtgatcccccacactggtactgagacacggaccagactcctacgggaggcagcagtgaggaatattggacaatgggtgcaagcctgatccagccatcccgcgtgaaggattaaggtcctatggattgtaaacttcttttatacagggataaacctctcctcgtgaggagagctgaaggtactgtatgaataagcaccggct

SEQ ID NO: 7221 - DNA, 490 bp, unidentified
  misc_feature 1..490: note = Ascusbbf_10348, encodes 16S rRNA
  source 1..490: mol_type = genomic DNA
agagtttgatcctggctcaggatgaacgctggcggcgtgcttaacacatgcaagtcgaacgaagaaggttagaatgagagcttcggcaggatttctatctatcttagtggcggacgggtgagtaacgtgtgggcaacctgccctgtactggggaataatcattggaaacgatgactaataccgcatgtggtcctcggaaggcatcttctgaggaagaaaggatttattcggtacaggatgggcccgcatctgattagctagttggtgagataacagcccaccaaggcgacgatcagtagccgacctgagagggtgatcggccacattgggactgagacacggcccaaactcctacgggaggcagcagtggggaatattgcacaatgggcgaaagcctgatgcagcaacgccgcgtgaaggatgaagggtttcggctcgtaaacttctatcaatagggaagaaacaaatgacggtacctaaataagaagcc

SEQ ID NO: 7222 - DNA, 490 bp, unidentified
  misc_feature 1..490: note = Ascusbbf_1452427, encodes 16S rRNA
  source 1..490: mol_type = genomic DNA
agagtttgatcatggctcagaacgaacgctggcagcgtggattaggcatgcaagtcgaacgggatccgagtggtagcaatatcgcttggtgagagtggcggaagggcgaggaacacgtgggcaacctgtctctgaggtggggaaaaccgctggaaacggcggctaataccgaatgtagcgcccgctcgcatgagcggagcgccaaagggggcgaaagctccccctctccgaggggcccgcgcaccatcagcttgttggcggggtaacggcccaccaaggctcacggttagctggtctgagaggatggccagccgaactgggactgagatactgcccagactcctacgggaggctgcagtcgaggatcatttgcaatgggcgaaagcctgacaatgcgacgctgcgtggaggatgaaggccctcgggttgtaaactcctgtcatgggggaaaaggaaaagggacccaacacgtccccgatttgatggtacc

SEQ ID NO: 7223 - DNA, 490 bp, unidentified
  misc_feature 1..490: note = Ascusbbf_724730, encodes 16S rRNA
  source 1..490: mol_type = genomic DNA
agagtttgatcatggctcaggatgaacgctagcggcaggcttaacacatgcaagtcgcggggcagcgcggatagcaatatctggcggcgaccggcggaagggtgcgtaacgcgtgagcaacatgcccgtatcagggggataaccgatggaaacgtcgcctaataccccataacaacagaggctgcatggtctttgtttgaaagttacggcggatacggattggctcgcgtgacattagctggttggcggggtaacggcccaccaaggctacgatgtctaggggttctgagaggaaggtcccccacactggaactgagacacggtccagactcctacgggaggcagcagtgaggaatattggtcaatggacgcaagtctgaaccagccatgccgcgtgcaggaatgaggccctatgggtcgtaaactgcttttgctgtggagcaataagtgctacgtgtagtacgatgagagcacacagcgaataagcatc

SEQ ID NO: 7224 - DNA, 490 bp, unidentified
  misc_feature 1..490: note = Ascusbbf_595302, encodes 16S rRNA
  source 1..490: mol_type = genomic DNA
agagtttgtcatggctcaggataaacgctggcggcgcacataagacatgcaagtcgaacggaagtcgttatatctgaaatggatatagactgcgaacttgttcaaagaaagttgaagtagattatataacaatggctttagtggcggactggtgagtaacgcgtaagaaatctacctattagaggggaataacaatgagaaatcattgctaataccgcatatgccatagatatcgcatgataatagtgggaaaggagaaatccgctaatagatgatcttgcgtctgattagctagttggtggggtaacggcctaccaaggcgacgatcagtagccggactgagaggttgaacggccacattgggactgagatacggcccagactcctacgggaggcagcagtcgggaatattgcgcaatggaggaaactctgacgcagtgacgccgcgtgcaggaagaaggttttcggattgtaaactgctttagacagg

SEQ ID NO: 7225 - DNA, 490 bp, unidentified
  misc_feature 1..490: note = Ascusbbf_130330, encodes 16S rRNA
  source 1..490: mol_type = genomic DNA
agagtttgatcatggctcagaacgaacgccggcggcgcgtcttaagcatgcaagtcgggcgggatcagggtgcttgcaccctgtgagagcggcggactggtgagtaacgcgtgggcgacgcaccccctgcaccgggacagccggcagaaatgccgggtgatacgggatgagctcatgtcctgtggtggggcatgaggaaagcggccacggccgcggcaggggagcggcccgcgtcccatcagctagtaggcggggcaaaggcccacctaggcgacgacgggtacccggactgagaggttggacgggcacattgggactgagatacggcccagactcctacgggaggcagcagctaagaatattccgcaatgggggaaaccctgacggagcgacgccgcgtggacgatggaggccggaaggttgtaaagtcctctggcgcctgaggaagtgcccgggcagggaatggcccgggagtgactgtagggcgaga

SEQ ID NO: 7226 - DNA, 490 bp, unidentified
  misc_feature 1..490: note = Ascusbbf_69420, encodes 16S rRNA
  source 1..490: mol_type = genomic DNA
agagtttgatcatggctcaggatgaacgctggcggcgtgcctaacacatgcaagtcgaacggagctgtttggatgaagttttcggatggattccttgcagcttagtggcggacgggtgagtaacgcgtggataacctgccttgatccgggggatagcagttggaaacgactggtaataccgcataagcgcacggcatggcatcatgcagtgtgaaaagatttatcgggtcaagatggatccgcgtctgattagccagttggcggggcaacggcccaccaaagcaacgatcagtagccggcctgagagggcggacggccacattgggactgagacacggcccagactcctacgggaggcagcagtgggggatattgcacaatgggcgcaagcctgatgcagcgacgccgcgtgagtgaagaagtatttcggtatgtaaagctctatcggcagggaagaaagcctcgcaagagggatgacggtacctgacta

SEQ ID NO: 7227 - DNA, 490 bp, unidentified
  misc_feature 1..490: note = Ascusbbf_29963, encodes 16S rRNA
  source 1..490: mol_type = genomic DNA
agagtttgatcctggctcaggatgaacgctggcggcgtgcttaacacatgcaagtcgaacggggaaatatataggaagatttcggttggaatatatattttctagtggcggacgggtgagtaacgcgtaaacaatctgccttagagagggggataacagatagaaatatctgctaataccgcataagaccacggtagggcatcctacaggggtaaaaggagaaatccgctttaagatgagtttgcgtactattagctagttggtggggtaacggcctaccaaggcgacgatggttagccggcctgagagggtgaacggccacattggaactgagaaacggtccagactcctacgggaggcagcagtgaggaatattgggcaatgggcgaaagcctgacccagcaacgccgcgtggaggaagaaggtcttcggattgtaaacttctgttatgggggaaaaagaaagtgatggtaccccatgagaaagctac

SEQ ID NO: 7228 - DNA, 490 bp, unidentified
  misc_feature 1..490: note = Ascusbbf_1557685, encodes 16S rRNA
  source 1..490: mol_type = genomic DNA
agagtttgatcctggctcaggatgaacgctggcggcgtgcttaacacatgcaagtcgaacgaagccaaaaggaagcttgctttctttgaagcttagtggcggacgggtgagtaacgcgtgaggaacctgcccttcagtggggaataacagccggaaacgactgctaataccgcataacgtcggagtgccgcatgacacatcgaccaaaggatttattcgctgaaggatggcctcgcgtccgattaggcagttggtgaggtaacggcccaccaaacctacgatcggtagccgaactgagaggttgatcgaccacattgggactgagacacggcccagactcctacgggaggcagcagtggggaatattgggcaatgggcgaaagcctgacccagcaacgccgcgtgaaggaagacggtcttcggattgtaaacttctttgattggggaagaacacaatgacctacccaaagaacaagtcacggctaactac

SEQ ID NO: 7229 - DNA, 490 bp, unidentified
  misc_feature 1..490: note = Ascusbbf_207489, encodes 16S rRNA
  source 1..490: mol_type = genomic DNA
agagtttgatcatggctcaggacgaacgctggcggcgtgcttaacacatgcaagtcgaacgaagcttgatttcggaatctttcgggatgaagaatgatatgacttagtggcggacgggtgagtaacgcgtgagtaacctgcctttcagagtggaataacgtttggaaacgaacgctaataccgcataacatcaaattatcgcatggtagaatgatcaaagatttatcgctgagagatggactcgcgtccgattaggtagttggtgaggtaacggctcaccaagccgacgatcggtagccggactgagaggttgaacggccacattgggactgagacacggcccagactcctacgggaggcagcagtggggaatattgcacaatgggcgcaagcctgatgcagcaacgccgcgtgagggaagacggtcttcggattgtaaacctttgtctttggtgaagaaggaagtgacggtagccaaggaggaagccac

SEQ ID NO: 7230 - DNA, 490 bp, unidentified
  misc_feature 1..490: note = Ascusbbf_1235484, encodes 16S rRNA
  source 1..490: mol_type = genomic DNA
agagtttgatcctggctcagattgaacgctggcggcaggcctaatacatgcaagtcggacgggattgggaccagagcttgctctgatcccatgagagtggcgcacgggtgcgtaacgcgtgagcaacctacctccatcagggggatagcctctcgaaagagagattaacaccgcataatatcaacagttcgcatgttcagttgattaaatatttataggatggagatgggctcgcgtgacattagctagttggtagggtaacggcttaccaaggcgacgatgtctaggggctctgagaggagaatcccccacactggtactgagacacggaccagactcctacgggaggcagcagtaaggaatattggtcaatgggcggaagcctgaaccagccatgtcgcgtgcatgatgactgccctatgggttgtaaactgcttttgtccgggaataaacctccttacgtgtagggagctgaatgtaccggaagaat

SEQ ID NO: 7231 - DNA, 490 bp, unidentified
  misc_feature 1..490: note = Ascusbbf_186326, encodes 16S rRNA
  source 1..490: mol_type = genomic DNA
agagtttgatcctggctcaggatgaacgctggcggcgtgcctaatacatgcaagtcgagcgagaatcaacggatctgcgattcgtcaaggagaagttgaggaaagcggcggacgggtgagtaacgcgtaggcaacctgcccccggcagagggatagccattggaaacgatgattaaaacctcataacgccgcgggagcacatgctcctgcggccaaagatttatcggctggggatgggcctgcgtctgattaactagttggtggggtaacggcctaccaaggtgacgatcagtagccgacctgagagggtgatcggccacattggaactgagacacggtccaaacttctacggaaggcagcagtaaggaatcttgcacaatgggggaaaccctgatgcagcaacgccgcgtgaacgatgaaggccttagggttgtaaagttctgatctgggggaagaaggaagtgacggtaccccaggagaaagccccgg

SEQ ID NO: 7232 - DNA, 490 bp, unidentified
  misc_feature 1..490: note = Ascusbbf_704192, encodes 16S rRNA
  source 1..490: mol_type = genomic DNA
agagtttgatcatggctcaggacgaacgctggcggcgtgcttaacacatgcaagtcgaacgggaagaaaagaaagagcttgctcttttttggattctagtggcaaacgggtgagtaacacgtaaacaacctgccttcaggatggggacaacagacggaaacgactgctaataccgaataccttccaatttccgcatggagatgggaagaaagggtggcctctacttgtaagctatcgcctgaagagggggttgcgtctgattagctagttggtgaggtaacggcccaccaaggcgacgatcagtagccggtctgagaggatgaacggccacactggaactgagacacggtccagactcctacgggaggcagcagtggggaatcttccgcaatggacgaaagtctgacggagcaacgccgcgtgaacgatgaaggtcttcggattgtaaagttctgtgatccgggacgaaggcattgattgagaacattga

SEQ ID NO: 7233 - DNA, 490 bp, unidentified
  misc_feature 1..490: note = Ascusbbf_285658, encodes 16S rRNA
  source 1..490: mol_type = genomic DNA
agagtttgatcctggctcaggatgaacgctggcggcgtgcttaacacatgcaagtcgaacggaggacccttgaaggagttttcggacaacggataggaatccttagtggcggacgggtgagtaacgcgtgaggaacctgccttggagaggggaataacacagagaaatttgtgctaataccgcataacgcagtcatatcgcatggtaagactgccaaagatttatcgctctgagatggcctcgcgtctgattagcttgttggcggggtaacggcccaccaaggcgacgatcagtagccggactgagaggttggccggccacattgggactgagacacggcccagactcctacgggaggcagcagtggggaatattgggcaatgggcgcaagcctgacccagcaacgccgcgtgaaggaagaaggctttcgggttgtaaacttcttttatgtaggacgaagcaagtgacggtactacatgaataagctccg

SEQ ID NO: 7234 - DNA, 391 bp, unidentified
  misc_feature 1..391: note = Ascusbbf_1325840, encodes 16S rRNA
  source 1..391: mol_type = genomic DNA
agagtttgatcatggctcagattgaacgctggcggcaggcctaatacatgcaagtcgaacggtaacataagaaaagcttgcttttcttgatgacgagtggcggacgggtgagtaacatttgggaaactacctgatagagggggacaacagttggaaacgactgctaataccgcatacagcctaagggtgaaagaagcaattcgctatcagatgtgcccaaaacgggattagctagtaggtgaggtaaaggctcacctaggcgatgatctctagctggtctgagaggatgatcagccacattgggactgagacacggcccagactcctacgggaggcagcagtagggaatattgcacaatggaggtaactccgtgccagcagccgcggtaat

SEQ ID NO: 7235 - DNA, 490 bp, unidentified
  misc_feature 1..490: note = Ascusbbf_1789073, encodes 16S rRNA
  source 1..490: mol_type = genomic DNA
agagtttgatcctggctcagattgaacgctggcggcaggcctaacacatgcaagtcgagcggtaacaggagaagcttgcttcttgctgacgagcggcggacgggtgagtaatacttgggtatctgcccgatagtgggggacaacacggggaaactcgtgctaataccgcatacgtcctacgggagaaagcaggcttaggcttgcgctatcggatgagcccaagtcggattagctagttggtgaggtaaaggctcaccaaggcgacgatccgtaactggtctgagaggatgatcagtcacaccgggactgagacacggcccggactcctacgggaggcagcagtggggaatattggacaatgggggcaaccctgatccagccatgccgcgtgtgtgaagaaggccttagggttgtaaagcactttcagtgaggaggaaaagttagtggttaatacccactagccgtgacgttactcacagaagaagcaccg

SEQ ID NO: 7236 - DNA, 490 bp, unidentified
  misc_feature 1..490: note = Ascusbbf_1593361, encodes 16S rRNA
  source 1..490: mol_type = genomic DNA
agagtttgatcatggctcaggacgaacgctggcggcgtgcctaacacatgcaagtcgagcggaggaacacagaggaagttttcggacggaatctatgttctttagcggcggacgggtgagtaacgcgtgagcaacctgcctatcacagggggataacgcaccgaaaggtgcactaataccgcatgagaccacaacctcgcatgaggaagaggtcaaaggagcaatccggtgagagatgggctcgcgtccgattagatagttggtggggtaaaggcctaccaagtcaacgatcggtagccgacctgagagggtgatcggccacactggaactgagagacggtccagactcctacgggaggcagcagtggggaatattgggcaatgggggaaaccctgacccagcaacgccgcgtgagggaagaaggccttcgggttgtaaacctttgtccttagtgaagagcagaagacggtagctaaggaggaagccccg

SEQ ID NO: 7237 - DNA, 490 bp, unidentified
  misc_feature 1..490: note = Ascusbbf_46536, encodes 16S rRNA
  source 1..490: mol_type = genomic DNA
agagtttgatcatggctcaggatgaacgctggcggcgtgcttaacacatgcaagtcgagcgagaagctcgtgaacgattcttcggatgagtgatcgagtggaaagcggcggacgggtgagtaacgcgtaggcaacctgccccatacaaagggatagctactggaaacggtaattaatacctcataacacggagagaccgcatgatctttccgtcaaagatttatcggtatgggatgggcctgcgtctgattagctggttggtggggtaacggcccaccaaggcgacgatcagtagccgacctgagagggtaaacggccacattggaactgagacacggtccaaactcctacgggaggcagcagtggggaatattgcacaatggggggaaccctgatgcagcaacgccgcgtgagcgaagaaggcctttgggtcgtaaagctctgtcctgaaggaagaaggaagtgacggtacttcaggaggaagccccgg

SEQ ID NO: 7238 - DNA, 490 bp, unidentified
  misc_feature 1..490: note = Ascusbbf_130320, encodes 16S rRNA
  source 1..490: mol_type = genomic DNA
agagtttgatcctggctcaggacgaacgctggcggcgcgcctaacacatgcaagtcgaacgagagatgaggagcttgctcttcaaatcgagtggcgaacgggtgagtaacgcgtgaggaacctgcctcaaagagggggacaacagttggaaacgactgctaataccgcataagcccacagctcggcatcgagcagagggaaaaggagtgatccgctttgagatggcctcgcgtccgattagctagttggtgaggtaacggcccaccaaggcgacgatcggtagccggactgagaggttgaacggccacattgggactgagacacggcccagactcctacgggaggcagcagtggggaatattgcacaatgggggaaaccctgatgcagcgacgccgcgtggaggaagaaggtcttcggattgtaaactcctgttgttgaggaagataatgacggtactcaacaaggaagtgacggctaactacgtgccag

SEQ ID NO: 7239 - DNA, 490 bp, unidentified
  misc_feature 1..490: note = Ascusbbf_63925, encodes 16S rRNA
  source 1..490: mol_type = genomic DNA
agagtttgatcatggctcagaatgaacgttggcggcgtggattaggcatgcaagtcgaacggtaaggttacttagcttgctttgtaaccctagagtggcgaaagggatagtacaatgtagatcatataccctcaggttggggatagcgtctggaaacgggcggtaatacccgataacatctccggatcaaaggtgagattccgcctgaggattagtttacacactattagcttgttggcggggtaatggcccaccaaggcgacgatggttaccgggcgtgagagcgtgacccggatcactgggactgagacactgcccagacacctacgggtggctgcagtcgagaatcttcggcaatggacgaaagtctgaccgagcgacgccgcgtgtatgatgaaggccttcgggttgtaaaatactgtcgattaggcggaagtgtataggggttctcccttatacttgacctatcattggaggaaggacgggctaa

SEQ ID NO: 7240 - DNA, 490 bp, unidentified
  misc_feature 1..490: note = Ascusbbf_721770, encodes 16S rRNA
  source 1..490: mol_type = genomic DNA
agagtttgatcatggctcaggacgaacgctggcggcatgcctaatacatgcaagtcgagcggagttgataggaagcttgcttccttgatacttagcggcggacgggtgagtaacacgtaggcaacctgccctcaagcttgggacaactaccggaaacggtagctaataccgaatacttgttttcttcgcctgaagggaactggaaagacggagcaatctgtcacttgaggatgggcctgcggcgcattagctagttggtgaggtaacggctcaccaaggcgacgatgcgtagccgacctgagagggtgatcggccacactgggactgagacacggcccagactcctacgggaggcagcagtagggaatcttccgcaatgggcgaaagcctgacggagcaatgccgcgtgagtgatgaaggttttcggatcgtaaagctctgttgccagggaagaacgcttgggagagtaactgctcccaaggtgacggta

SEQ ID NO: 7241 - DNA, 490 bp, unidentified
  misc_feature 1..490: note = Ascusbbf_77712, encodes 16S rRNA
  source 1..490: mol_type = genomic DNA
agagtttgatcatggctcaggacgaacgctggcggcgtgcctaacacatgcaagtcgaacggagtgatttggattcgtctggatcacttagtggcggacgggtgagtaacgcgtgagcaacctgcccttcagagggggacaacagttggaaacgactgctaataccgcataacatatatttggggcatctcagatatatcaaagattttatcgctgagggatgggctcgcgtctgattagatagttggtggggtaacggcctaccaagtcgacgatcagtagccggactgagaggttgaacggccacattgggactgagatacggcccagactcctacgggaggcagcagtggggaatattgggcaatgggggcaaccctgacccagcaacgccgcgtgaaggaagaaggctttcgggttgtaaacttcttttatgtgggacgatagtgacggtaccacatgaataagccacggctaactacgtgccagc

SEQ ID NO: 7242 - DNA, 490 bp, unidentified
  misc_feature 1..490: note = Ascusbbf_65518, encodes 16S rRNA
  source 1..490: mol_type = genomic DNA
agagtttgatcatggctcaggataaacgctggcggcgcacataagacatgcaagtcgaacggacttaaccgttagtttactaatggagcggttagtggcggactggtgagtaacgcgtaagcaatctgcctgttagagggggataacagtgagaaatcactgctaataccgcatatgctgtgaacatcacatgatgtaaacaggaaaggagcaatccgctaatagatgagcttgcgtctgattagttagttggtgaggtaacggcccaccaagacgatgatcagtagccggactgagaggttaaacggccacattgggactgagatacggcccagactcctacgggaggcagcagtcgggaatattgcgcaatggaggaaactctgacgcagtgacgccgcgtgcaggaagaaggttttcggattgtaaactgctttagacagggacgaaaaaaatgacggtacctgtagaataagctccggctaactac

SEQ ID NO: 7243 - DNA, 490 bp, unidentified
  misc_feature 1..490: note = Ascusbbf_109932, encodes 16S rRNA
  source 1..490: mol_type = genomic DNA
agagtttgatcctggctcaggacgaacgctggcggcgtgcctaacacatgcaagtcgagcggggacactgggggagcttgcttcactggtgttctagcggcggacgggtgagtaacgcgtgaacaatctgtcccggacagggggataacacttggaaacaggtgctaataccgcataagcccacggcatcacatgatgcagggggaaaaggagcgatccggtttggggtgagttcgcgtccgattagatagttggtgaggtaacggcccaccaagtcaacgatcggtagccgacctgagagggtgatcggccacattggaactgagacacggtccaaactcctacgggaggcagcagtgggaatattgggcaatgggcgaaagcctgacccagcaacgccgcgtgagggaagaaggttttcggattgtaaacctctgtcctcagggacgaaggaagtgacggtacctgaggaggaagccccggctaacta

SEQ ID NO: 7244 - DNA, 490 bp, unidentified
  misc_feature 1..490: note = Ascusbbf_205713, encodes 16S rRNA
  source 1..490: mol_type = genomic DNA
agagtttgatcatggctcaggataaacgctggcggcgtgcttaacacatgcaagtcgaacggagtggttctcccgaagacctgacgagcttgctctgatggaattcatttgaatcacttagtggcggacgggtgagtaacgcgtgggtaacctgcctcacactgggggatagcagttggaaacgactgataataccgcataagcgcacagtaccgcatggtacagtgtgaaaaactccggtggtgtgagatggacccgcgtctgattagctagttggtgaggtaacggcccaccaaggcgacgatcagtagccggcctgagagggtgtacggccacattgggactgagacacggcccaaactcctacgggaggcagcagtggggaatattggacaatgggggcaaccctgatccagcgacgccgcgtgagcgaagaagtatttcggtatgtaaagctctatcagcagggaagataatgacggtacctgac

SEQ ID NO: 7245 - DNA, 490 bp, unidentified
  misc_feature 1..490: note = Ascusbbf_161868, encodes 16S rRNA
  source 1..490: mol_type = genomic DNA
agagtttgatcctggctcaggacgaacgctggcggcgtgcttaacacatgcaagtggagcgacgaaccagggcttgccctggggcaaagccgcgaacgggtgagtaacacgtgagtaacctgccccgatgactgggataacccgaggaaactcgggctaataccggatgtggtgaacgcgcataagcgcattcatcaaaggtagcttcggcttccgcattgggaggggctcgcggcccattagctagttggtggggtaaaggcctaccaaggcaacgatgggtagctggtctgagaggacgatcagccacactgggactgagacacggcccagactcctacgggaggcagcagtggggaatcttgcgcaatgcgcgaaagcgtgacgcagcaacgccgcgtgagggaagacggccttcgggttgtaaacctctttcagatgggacgaaggcgcaccggttaacagccgtgtgggctgacggtaccttcag

SEQ ID NO: 7246 - DNA, 490 bp, unidentified
  misc_feature 1..490: note = Ascusbbf_908010, encodes 16S rRNA
  source 1..490: mol_type = genomic DNA
agagtttgatcctggctcaggacgaacgctggcggcgtgcttaacacatgcaagtcgaacgctgaagccctttcgggggtggatgagtggcgaacgggtgagtaacacgtgggtaatctgccctgtacttcgggataagccttggaaacggggtctaataccggataggacacactgtcgcatggtggtgtgtggaaagttccggcggtatgggacgagcccgcggcctatcagcttgatggtggggtgatggcctaccatggcgacgacgggtagccggcctgagagggtgaccggccacactgggactgagacacggcccagactcctacgggaggcagcagtggggaatcttgcgcaatgggcgaaagcctgacgcagcaacgccgcgtgagggaggacggccttcgggttgtaaacctctttcgacaccgacgaaggccctgtgggtttgacggtaggtgtggaagaagcaccggctaactacgtg

SEQ ID NO: 7247 - DNA, 490 bp, unidentified
  misc_feature 1..490: note = Ascusbbf_62955, encodes 16S rRNA
  source 1..490: mol_type = genomic DNA
agagtttgatcctggctcaggacgaacgctggcggcgtgcttcatacatgcaagtcgaacgagaagctgacttcggtcagtggaaagtggcggacgggtgagtaatatgtaggaaatctgccctagagagggggacaacagagggaaacttctgctaataccccatatgagcttagttgaaatactaatcttgaaaactccggtgctctgggatgagcctgcatctgattagctagttggcggtgtaatggaccaccaaggcgacgatcagtagctggtttgagaggatgatcagccacaatgggactgggacacggcccatactcctacgggaggcagcagtagggaattttgcgcaatgggcgaaagcctgacgcagcaacgccgcgtgaacgattaagcccttcggggtgtaaagttctgtcagtggggacgaaacttgacggtacccacagaggaagcaccggctaactccgtgccagcagccgcg

SEQ ID NO: 7248 - DNA, 490 bp, unidentified
  misc_feature 1..490: note = Ascusbbf_682592, encodes 16S rRNA
  source 1..490: mol_type = genomic DNA
agagtttgatcctggctcaggatgaacgctagctacaggcttaacacatgcaagtcgaggggcagcacatgaagtagcaatacggatggtggcgaccggcgcacgggtgagtaacgcgtatgcaacctgcctacaacaggggaataacccgttgaaagacggactaataccccataacacagggatcccgcatgggaatatttgttaaagatttatcggttgtagatgggcatgcgttccattagcttgttggtgaggtaacggctcaccaaggcaacgatggataggggaactgagaggtttatcccccacactggtactgagacacggaccagactcctacgggaggcagcagtgaggaatattggtcaatggacgcaagtctgaaccagccacgtcgcgtgaaggaagacggccctacgggttgtaaacttcttttgtaagggaataaagtgtagtacgtgtactattttgcatgtaccttacgaat

SEQ ID NO: 7249 - DNA, 490 bp, unidentified
  misc_feature 1..490: note = Ascusbbf_10875, encodes 16S rRNA
  source 1..490: mol_type = genomic DNA
agagtttgatcctggctcagagtgaacgctggcggcgtggctcagacatgcaagtcgagcgagaatatgccttcgggtataggaaagcggcaaacgggtgagtaatacgtaagtaatctgcctctaaaacgggaatagcttggtgaaaactgaggtaatgcccgataccaacttgtttcgcatgaaacaagtttgaaaggtttgtaatgacgtttagagaggagcttgcggcctatcagcttgttggcggtgtaatagaccaccaaggctaagacgggtagccggtctaagaggatgtacggccacattgaaactgagatacggttcaaacatctatggatggcagcagtttcgaattattcacaatgggcgaaagcctgatggtgcgacgccgcgtggaggatgaaggtcttcggattgtaaactcctgtcgttggggagtaaaaagctggtgaagaatcagccttgagttaacccaaagaggaagcag

SEQ ID NO: 7250 - DNA, 490 bp, unidentified
  misc_feature 1..490: note = Ascusbbf_90673, encodes 16S rRNA
  source 1..490: mol_type = genomic DNA
agagtttgatcctggctcaggatgaacgctagcgacaggcttaacacatgcaagtcgaggggcagcgagtggcgttgttcgcaacgccatgtcggcgaccggcgcactggtgagtaacacgtatgcaacctgccctttaccggggcataacccttggaaacgaggcctaattccccatatacagcattcgggcatccgtgagctgtgaaaggtttattccggtgaaggatgggcatgcgtcgcattagcttgttggcggggtgacggcccaccaaggcgacgatgcgtaggggttctgagaggaaggtcccccacactggtactgagacacggaccagactcctacgggaggcagcagtgaggaatattggtcaatggacggaagtctgaaccagccaagtcgcgtgagggaaggcggtcctatggattgtaaacctcttttgtcggggagcaacggccggaacgtgttccggtgtgcgcgtacccgtcg

SEQ ID NO: 7251 - DNA, 490 bp, unidentified
  misc_feature 1..490: note = Ascusbbf_34047, encodes 16S rRNA
  source 1..490: mol_type = genomic DNA
agagtttgatcatggctcaggacgaacgctggcggcatgcctaacacatgcaagtcgaacggagccaactaaaagatcccttcggggtgaatttggggaagcttagtggcggacgggtgagtaacgcgtgagtaacctgcctttgagagtggaataacgttccgaaaggaacgctaataccgcataacgtgtcaatatcgcatggtaatgacaccaaagatttatcgctcagagatggactcgcgtctgattagcttgttggtgaggtaacggctcaccaaggcgacgatcagtagccgagctgagaggctgatcggccacattgggactgagacacggcccagactcctacgggaggcagcagtgggggatattgcgcaatggggggaaccctgacgcagcaatgccgcgtgaaggaagaaggtcttcggatcgtaaacttttgtcttcggggacgataatgacggtacccgaggaggaagccacggct

SEQ ID NO: 7252 - DNA, 490 bp, unidentified
  misc_feature 1..490: note = Ascusbbf_34865, encodes 16S rRNA
  source 1..490: mol_type = genomic DNA
agagtttgatcctggctcaggatgaacgctggcggcgtgcttaacacatgcaagtcgaacgggaactctagactgaaagttcgctggatgtttagaaattctagtggcggacgggtgagtaacgcgtgggtaacctgcctataagacgtgaacaacagttagaaatgactgctaatacacgataagcacaccagtatcgcatgatacagtgtgaaaagaatttcgcttatagatggacccgcgtttgattagccagttggtggggtaacggcctaccaaagcgacgatcaatagccggcctgagagggcgaccggccacattgggactgagacacggcccaaactcctacgggaggcagcagtggggaatattggacaatgggggcaaccctgatccagcaacgccgcgtgagtgatgaagtatcttggtatgtaaagctctatcagtaggaacgaaaatgacggtacctaactaagaagccccggctaa

SEQ ID NO: 7253 - DNA, 490 bp, unidentified
  misc_feature 1..490: note = Ascusbbf_260827, encodes 16S rRNA
  source 1..490: mol_type = genomic DNA
agagtttgatcatggctcagaacgaacgctggcggcgtgcttaacacatgcaagtcgaacgcgaaagcggcttcggtcgtgagtagagtggcgcacgggtgagtaacgcgtagataacctgtcttcatatctgggataacacgccgaaaggggtactaataccggatatactcgcatttcaataggtgaggcgagaaaaggtggcctctgattcaagctactgtatgaagaggggtctgcgtaccattagctagtaggtggggtaatggcctacctaggcgacgatggttagcgggtctgagaggatgatccgccacactggcactggaatacgggccagactcctacgggaggcagcagtgaggaatattgcgcaatgggggcaaccctgacgcagcgacgccgcgtgagtgaggaaggtcttcggatcgtaaagctctgtcaagagggaagaagtgctgggtggctaatatccgcccagtttgacggt

SEQ ID NO: 7254 - DNA, 490 bp, unidentified
  misc_feature 1..490: note = Ascusbbf_38206, encodes 16S rRNA
  source 1..490: mol_type = genomic DNA
agagtttgatcctggctcaggatcaacgctggcggcgtgcctaatgcatgcaagtcgaacggggtctccttcgggaggctcacgtggcggacgggtgaggaacacgtggccaatctgcccactggcagggggtagccggcggaaacgccgggtaattccgtatgcgcttgccgctcgagtgggagtggtaaggaaaggggtaacccgccggtggaggaggctgcggccgattagctagttggtggggtaacggctcaccaaggcgatgatcggtagctggtctgagaggatgatcagccacacggggactgagacacggccccgactcctacgggaggcagcagcaaggaattttccgcaatgggcgaaagcctgacggagcaacgccgcgtgcgggatgacgcgtttcggcgtgtaaaccgctgttcgtggggacgaagcactgacggtacccacggaggaaggcccggctaactacgtgccagcagcc

SEQ ID NO: 7255 - DNA, 490 bp, unidentified
  misc_feature 1..490: note = Ascusbbf_53428, encodes 16S rRNA
  source 1..490: mol_type = genomic DNA
agagtttgatcatggctcagaatgaacgctggcggcatggattaggcatgcaagtcgaacgagaaagcggcctcggccgcgagtaaagtggcgaaagggtgagtagcacgtggggaacctgccccggggaccggaacaagcccgtgaaaacgggtctgaaaccggatgccgccccggcccgcatgggccggaggcgaaaaattcattgccccgggatggccccgcgccccattagctagttggcggggtgaaggcccaccaaggctgcgacgggtaggtggtctgagaggatggtcacccacactgggactgagacactgcccagactcctacgggaggctgcagtcgagaatcttccgcaatgggcgcaagcctgacggagcgatgccgcgtgagggaaggaggccttcgggtcgtaaacctctgtcggccggaacgaagaaagcgacggtaccggccaaggaagccacggctaaccacgtgccagcag

SEQ ID NO: 7256 - DNA, 490 bp, unidentified
  misc_feature 1..490: note = Ascusbbf_14812, encodes 16S rRNA
  source 1..490: mol_type = genomic DNA
agagtttgatcatggctcaggacgaacgctggcggcgtgcttaacacatgcaagtcgaacggagttataggagagcttgctcgaatataacttagtggcggacgggtgagtaacgcgtgaataatctgtctcacacaggggaataacgcatcgaaagatgtgctaataccgcgtaggaccacggaagggcatccttcagaggtgaaaggcttcggccggtgtgaggtgagttcgcgtctgattagatagttggtggggtaacggcctaccaagtcaacgatcagtagccgacctgagagggtgatcggccacattgggactgagacacggcccagactcctacgggaggcagcagtggggaatattgggcaatgggcgaaagcctgacccagcaacgccgcgtgaaggaagaaggttttcggatcgtaaacttctgtccttggtgaagataatgacggtagccaaggaggaagccccggctaactacgtg

SEQ ID NO: 7257 - DNA, 490 bp, unidentified
  misc_feature 1..490: note = Ascusbbf_18554, encodes 16S rRNA
  source 1..490: mol_type = genomic DNA
agagtttgatcatggctcaggatgaacgctggcggcgcgcttaacacatgcaagtcgaacggggtgagtaacttcggttatgaattcagtggcggacgggtgagtaacgcgtggataatttgcctttcagtgggggatagctgagagaaatctcaattaataccgcataatataatttatttgcatgattaagttattaaagatgcgaatcgctgaaagagaagtctgcgtctgattagctagttggggtggtaatggcacaccaaggcaacgatcagtaaccggtttgagagaatggacggtcacattgggactgagatacggcccagactcctacgggaggcagcagtggggaatattgcgcaatggaggaaactctgacgcagcgacgccgtgtgaaggatgaaggccttcgggttgtaaacttttatcgattgtgaaaagaaaggatggtagcaaagtaagaagctccggctaactacgtgccagc

SEQ ID NO: 7258 - DNA, 490 bp, unidentified
  misc_feature 1..490: note = Ascusbbf_183116, encodes 16S rRNA
  source 1..490: mol_type = genomic DNA
agagtttgatcctggctcaggataaacgctggcggcgcacataagacatgcaagtcgaacggaagtcgttatattgattttgaagaaaacggagaacttgttcaaagggacatgatgaagatatataacaatggctttagtggcggactggtgagtaatacgtaagcaacctgcctatcagaggggaacaacagttagaaatgactgctaataccgcatatgccatagtaaccacatggttacagtgggaaaggagtaatctgctgatagatgggcttacggctgattagctagttggtggggtaatggcctaccaaggcgacgatcagtagccggactgagaggttcaacggccacattgggactgagatacggcccagactcctacgggaggcagcagtcgggaattttgcgcaatggaggaaactctgacgcagtgacgccgcgtgcaggaagaaggttttcggattgtaaactgctttagacaggg

SEQ ID NO: 7259 - DNA, 490 bp, unidentified
  misc_feature 1..490: note = Ascusbbf_95122, encodes 16S rRNA
  source 1..490: mol_type = genomic DNA
agagtttgatcatggctcaggatgaacgctggcggcgtgcgtaacacatgcaagttgagcgacgacgtttccgaagtggcgacatggaggggacgagcggagcagcggacgggtgagtacaacatgagaagctgtcctttggtgggggacaacgtctggaaacggacgctaataccccataggccgagaggttaaagccgtaaggcgccaaggggggtgctcgtgtcctatcagctagttggtgaggtaatggctcaccaaggcgacgacgggtagccggcctgagagggtgtccggccacactgggactgagatacggcccagactcctacgggaggcagcagtggggaatattgggcaatgggagagatcctgacccagcgacgccgcgtgaacgaagaaggccttcgggtcgtaaagttcttttatgggggaagaaggaagtgacggtaccccatgaataagccccggctaactacgtgccagcagc

SEQ ID NO: 7260 - DNA, 490 bp, unidentified
  misc_feature 1..490: note = Ascusbbf_85882, encodes 16S rRNA
  source 1..490: mol_type = genomic DNA
agagtttgatcatggctcaggacgaacgctggcggcgtgcctaacacatgcaagtcgaacggagtgaaacgctgatccgagagcagcttgctgcaggacgatcttgtttcacttagtggcggacgggtgagtaacgcgtgagcaacctgcccttcagagggggacaacagttggaaacgactgctaataccgcataacgtatcgggaggacatcctcctgataccaaaggagcaatccgctgaaggatgggctcgcgtccgattagatagttggcggggcaacggcccaccaagtcgacgatcggtagccggactgagaggttgatcggccacattgggactgagatacggcccagactcctacgggaggcagcagtgggggatattgcacaatggaggaaactctgatgcagcaacgccgcgtgagggaagaaggtcttcggattgtaaacctttgtctttggtgacgaaacatgacggtagccaagga

SEQ ID NO: 7261 - DNA, 490 bp, unidentified
  misc_feature 1..490: note = Ascusbbf_69559, encodes 16S rRNA
  source 1..490: mol_type = genomic DNA
agagtttgatcctggctcagaatgaacgctggcggcatggattaggcatgcaagtcgaacgagaaagttagcaatagcgagtaaagtggcgaaagggtgagtaacacgtgaggaacctgccccctggcccggaacaagcctgtgaaaacgggtctgacaccggatgaggacccctcccgcatgggaggcagtccaaatattgatagccaagggatggcctcgcgtcccattagctagttggcggggtaacggcccaccaaggctgcgacgggtaggtggtctgagaggatggtcacccacactgggactgagacactgcccagactcctacgggaggctgcagtcgagaatcttccgcaatgggcgcaagcctgacggagcgatgccgcgtgagggacgaaggccttcgggttgtaaacctctgtcgacgggaacgaacacaatgacggtacccgtcaagaaagccacggctaaccacgtgccagcagcc

SEQ ID NO: 7262 - DNA, 490 bp, unidentified
  misc_feature 1..490: note = Ascusbbf_40860, encodes 16S rRNA
  source 1..490: mol_type = genomic DNA
agagtttgatcatggctcaggatgaacgctagcggcaggcttaacacatgcaagtcgaggggcagcgcggggtagcaatactctggcggcgaccggcggaagggtgagtaacgcgtgagcaacatgcccgtgacagggggataagcgctggaaacggcgtctaatatcccgtaacacagcggatggcatcatctgctgttgaaagctacggtggtcacggattggctcgcgtcccattaggcagttggcggggtaacggcccaccaaaccgacgatgggtaggggttctgagaggaaggtcccccacaatggaactgagacacggtccatactcctacgggaggcagcagtgaggaatattggtcaatgggcggaagcctgaaccagccatgccgcgtgaaggaataaggccctatgggtcgtaaacttcttttgacgcagagcaataaggattacgtgtaatccgatgagagtatgtgtcgaataagca

SEQ ID NO: 7263 - DNA, 490 bp, unidentified
  misc_feature 1..490: note = Ascusbbf_105424, encodes 16S rRNA
  source 1..490: mol_type = genomic DNA
agagtttgatcatggctcagaacgaacgctggcggcgcgtcttaagcatgcaagtcgagcggtaagattggtgcttgcaccgatcctagagcggcggactggtgagtaacgcgtgggtgacctaccccgtggatgggaatagccggtagaaataccgggtaatgccgaatacggtccctgacgtcagaggtcagggaggaaaggagctccggctccgccacgggaagggcccgcgtactattagctagttggtgaggtaacggcccaccaaggcgacgatagttatccggcctaagagggtgaacggacacattgggactgagatacggcccagactcctacgggaggcagcagctaagaatattccgcaatgggcgaaagcctgacggagcgacgccgcgtggatgatgaaggccggaaggttgtaaaatccttttgtacatgaggaataagcgcaggagggaatgcctgcgtggtgactgtagtgtaa

SEQ ID NO: 7264 - DNA, 490 bp, unidentified
  misc_feature 1..490: note = Ascusbbf_199459, encodes 16S rRNA
  source 1..490: mol_type = genomic DNA
agagtttgatcatggctcaggatgaacgctggcggcgcatttaagacatgcaagtcgaacgaaaaaactcaattgaaatggaatcgaagatttatctgagaagaagtttcgcccgagttttttagtggcggacgggtgagtaatacatagataatctgcctttcagagagaaataacaagaagaaattcttgctaatgtcacataagaccacactaccgcatgatagagaggtcaaaggagaaatccgctgaaagatgagtctatggctgattagctagttggcaaggtaagagcttaccaaggcgatgatcagtagccgagctgagaggctggccggccacattgggactgagacacggcccagactcctacgggaggcagcagttgggaatattggacaatggaggaaactctgatccagtgacgccgcgtgaaggaagaaggtcttcggattgtaaacttattttatcagggaagaaaaaaatgact

SEQ ID NO: 7265 - DNA, 490 bp, unidentified
  misc_feature 1..490: note = Ascusbbf_110106, encodes 16S rRNA
  source 1..490: mol_type = genomic DNA
agagtttgatcatggctcaggatgaacgctggcggcgtgcttaacacatgcaagtcgaacgggattatttggaagcttgcttttgaataatctagtggcggacgggtgagtaacgcgtgggtaacctgccgtatgctgggggacaacagttggaaacgactgctaataccgcataagcgcacagggccgcatggcccggtgtgaaaaactccggtggcatacgatggacccgcgtctgattaggcagttggcgaggtaacggctcaccaaaccgacgatcagtagccggcctgagagggtgaacggccacattgggactgagacacggcccaaactcctacgggaggcagcagtggggaatattgcacaatgggggaaaccctgatgcagcgacgccgcgtgagtgaagaagtatttcggtatgtaaagctctatcagcaggaaagaaaatgacggtacctgactaagaagccccggctaactacgtgcc

SEQ ID NO: 7266 - DNA, 490 bp, unidentified
  misc_feature 1..490: note = Ascusbbf_68277, encodes 16S rRNA
  source 1..490: mol_type = genomic DNA
agagtttgatcatggctcaggatgaacgctggcggcgtgcctaacacatgcaagtcgagcgagaatcttagaagtgaagtttcgatggatcttttaagaggagagcggcggacgggtgagtaacgcgtaggcaacctgcctcacactgagggatacttccgggaaactggaactaatacctcataacgcgagagtttcacatgttactctcgccaaagatttatcggtgtgagatgggcctgcgtctgattagatagttggtgaggtaacggcccaccaagtcaacgatcagtagccgacctgagagggtaatcggccacattggaactgagacacggtccaaactcctacgggaggcagcagtggggaatattgcacaatggaggaaactctgatgcagcaacgccgcgtgaaggatgaaggtcttcggatcgtaaacttctgtccttggggacgaaacaaatgacggtacccttggaggaagccccgg

SEQ ID NO: 7267 - DNA, 490 bp, unidentified
  misc_feature 1..490: note = Ascusbbf_56857, encodes 16S rRNA
  source 1..490: mol_type = genomic DNA
agagtttgatcatggctcagattgaacgctggcggcatgccttacacatgcaagtcgaacggtaacaggtcttcggatgctgacgagtggcgaacgggtgagtaatacatcggaacgtgcccgatcgtgggggataacgaggcgaaagctttgctaataccgcatacgatctacggatgaaagcgggggatcttcggacctcgcgcggacggagcggccgatggcagattaggtagttggtgggataaaagcttaccaagccgacgatctgtagctggtctgagaggatgatcagccacactgggactgagacacggcccagactcctacgggaggcagcagtggggaattttggacaatgggcgaaagcctgatccagccatgccgcgtgcaggatgaaggccttcgggttgtaaactgcttttgtacggaacgaaaagcctctttctaataaagaggggtcatgacggtaccgtaagaataagcaccg

SEQ ID NO: 7268 - DNA, 490 bp, unidentified
  misc_feature 1..490: note = Ascusbbf_202817, encodes 16S rRNA
  source 1..490: mol_type = genomic DNA
agagtttgatcctggctcaggacgaacgctggcggcgcgcctaacacatgcaagtcgaacggagttaaaggagcttgctcttttaacttagtggcggacgggtgagtaacacgtgagcaacctgccttttagtgggggacaacagttggaaacgactgctaataccgcataaagttgcgaggaggcatctccatgcaaccaaagatttatcgctgaaagatgggctcgcgtctgattagatagttggtgaggtaacggcccaccaagtcgacgatcagtagccggactgagaggttgaacggccacattgggactgagacacggcccagactcctacgggaggcagcagtgggggatattggacaatgggggaaaccctgatccagcgacgccgcgtgagggaagaaggttttcggattgtaaacctctgttgacagggaagaaaacgacggtacctgtttagaaagccacggctaactacgtgccagca

SEQ ID NO: 7269 - DNA, 490 bp, unidentified
  misc_feature 1..490: note = Ascusbbf_65936, encodes 16S rRNA
  source 1..490: mol_type = genomic DNA
agagtttgatcatggctcagattgaacgctggcggaatgctttacacatgcaagtcgaacggcagcacgggagcttgctcctggtggcgagtggcgaacgggtgagtaacatatcggaacgtacctagtaatgggggataactaatcgaaaggttggctaataccgcatacgccctgagggggaaagcgggggatcgtaagacctcgcgttattagagcggccgatatctgattagctagttggtggggtaaaggcccaccaaggcgacgatcagtagctggtctgagaggacgaccagccacactggaactgagacacggtccagactcctacgggaggcagcagtggggaattttggacaatgggcgcaagcctgatccagccattccgcgtgagtgaagaaggccttcgggttgtaaagctctttcgcaagggaagaaaacttaccttctaataaagggtgaggttgacggtaccttgataagaagc

SEQ ID NO: 7270 - DNA, 490 bp, unidentified
  misc_feature 1..490: note = Ascusbbf_1805943, encodes 16S rRNA
  source 1..490: mol_type = genomic DNA
agagtttgatcatggctcaggatgaacgctagcggcaggcttaacacatgcaagtcgaggggcagcgcgttgtagcaatacaatggcggcgaccggcgcaagggtgcgtaacgcgtgagcaacatgcccgcaacagtgggataaccggaggaaactccgactaatacctcataaggatgtaggatggcatcgtccagcatctaaacttacgagggttgcggattggctcgcgggacattaggtagacggcggggtaacggcccaccgtgccgacgatgtctaggggttctgagaggaaggtcccccacactggaactgagacacggtccagactcctacgggaggcagcagtgaggaatattggacaatggtcggaagactgatccagccatgccgcgtgcaggaagacggtcctatggattgtaaactgcttttgtacgggagcaataaggtgtacgcgtacaccgatgagagtaccgtacgaataagc

SEQ ID NO: 7271 - DNA, 490 bp, unidentified
  misc_feature 1..490: note = Ascusbbf_195917, encodes 16S rRNA
  source 1..490: mol_type = genomic DNA
agagtttgatcctggctcaggatgaatgctggcggcgtgcctaatacatgcaagtcgagcggtaacagggtttcaccgtgttcttgacactccgggctataagcgggaggttagatttcgaggacaccgtgaagctgctgacgagcggcggacggctgagtaacgcgtgggaacgtaccccaaactgagggataacgcaccgaaaggtgtgctaataccgcatatgatcttcggattaaagcttcggcggtttgggaatggcctgcgtacgattagatagttggtgaggtaatggctcaccaagtcgacgatcgttagatggtttgagaggatgatcatccagactgggactgagacacggcccagactcctacgggaggcagcagtagggaatctttcacaatgggcgaaagcctgatggagcaacgccgcgtgcaggatgaaggccttcgggttgtaaactgcttttataagcgagaaatatgatggt

SEQ ID NO: 7272 - DNA, 490 bp, unidentified
  misc_feature 1..490: note = Ascusbbf_404092, encodes 16S rRNA
  source 1..490: mol_type = genomic DNA
agagtttgatcctggctcaggacgaacgctggcggcgtgcctaacacatgcaagtcgaacggggaagagaagcttgcttttctttctagtggcggacgggtgagtaacgcgtgagcaacctacctatcagtgggggataacgtctggaaacagacgctaataccgcatatcgtacataattcgcatgaataagtgtatgaaaggagtaatttgctggtagatgggctcgcgtccgattagccggttggtggggtaacggcctaccaaagcaacgatcggtagccggactgagaggttgaacggccacattgggactgagacacggcccagactcctacgggaggcagcagtgggggatattgcgcaatggaggaaactctgacgcagcaacgccgcgtgaaggatgaaggttttcggattgtaaacttctgttcttggtgaagaaaaaaatgacggtagccaagcagcaagctccggctaactacgtgcc

SEQ ID NO: 7273 - DNA, 490 bp, unidentified
  misc_feature 1..490: note = Ascusbbf_222712, encodes 16S rRNA
  source 1..490: mol_type = genomic DNA
agagtttgatcctggctcaggacgaacgctggcggcgtgcttaacacatgcaagtcgaacggacgattccccttcgggggaaaagttagtggcggacgggtgagtaacgcgtgagtaacctgccttggagtggggaataacacagggaaacttgtgctaataccgcataacatcgcgaaggggcatctctttgcgatcaaagatttattgctccaagatgggctcgcgtccgattagatagttggcggggtaacggcccaccaagtcgacgatcggtagccggactgagaggttggccggccacattgggactgagatacggcccagactcctacgggaggcagcagtgaggaatattaggcaatgggggaaaccctgacctagcgacgccgcgtgaaggatgaaggttttcggattgtaaacttcttttatgagggacgatagtgacggtacctcatgaataagccacggctaactacgtgccagcagc

SEQ ID NO: 7274 - DNA, 488 bp, unidentified
  misc_feature 1..488: note = Ascusbbf_1102196, encodes 16S rRNA
  source 1..488: mol_type = genomic DNA
agagtttgatcctggctcagaatgaacgctggcggcatggattaggcatgcaagtcgaacggggcccctcggggcccagtggcggaagggtgagtaacacgtgagcaacccgcccccaaggccggaacaagcgctggaaacggcgtctgaaaccggatgaggatccccaccgcatggtggggcgtccaaatattcataccctggggatgggctcgcggcccattagcttgtcggcggggcgacggcccaccgaggcgacgacgggtaggtggtctgagaggatggtcacccacactgggactgagacactgcccagactcctgcgggaggctgcagtcgagaatcttccgcaatgggcgcaagcctgacggagcgatgccgcgtgagggacggaggccttcgggtcgtgaaaatatgtagaaagggacgatgatgacggtaccgggaaaggaagccacggctaaccacgtgccagcagccgcggtaat

SEQ ID NO: 7275 - DNA, 490 bp, unidentified
  misc_feature 1..490: note = Ascusbbf_490980, encodes 16S rRNA
  source 1..490: mol_type = genomic DNA
agagtttgatcatggctcagaacgaacgctggcggcgcgtcttaagcatgcaagtcgagcggcaagatgcctccgggcatcctagagcggcggactggtgagtaacacgtggatgacgcaccctcccgacggggatagcctgtggaaacacagggtaataccggataaggccgccagggctggagcctggcggggaaaggggctattgccccgcgggaggagcggtccgcggcccatcagctggttggcggggtaaaggcccaccaaggcgatgacgggtatccggcctgagagggtgagcgggcacattgggactgagatacggcccagactcctacgggaggcagcagctaagaatattccgcaatgggcgaaagcctgacggagcgacgccgcgtggacgatgaaggccggaaggttgcagagtcctttggcgcctgaggaaggagcgcgggagtggaaagcccgcgcggtgactgtagggcgagaa

SEQ ID NO: 7276 - DNA, 490 bp, unidentified
  misc_feature 1..490: note = Ascusbbf_104951, encodes 16S rRNA
  source 1..490: mol_type = genomic DNA
agagtttgatcatggctcaggatgaacgctggcggcgtgcttaacacatgcaagtcgaacggagtatagacgctgcagagatttcggtcaaagcttgtttatacttagtggcggacgggtgagtaacgcgtgggtaacctgccgtatgcagggggacaacagttggaaacgactgctaataccgcatatgcgcacagtaccgcatggtacagtgtggaaagatttatcggcatacgatggacccgcgtttgattagatagttggtgaggtaacggctcaccaagtcgacgatcaatagccggcctgagagggcaatcggccacattgggactgagacacggcccaaactcctacgggaggcagcagtggggaatattgcacaatgggggaaaccctgatgcagcgacgccgcgtgagtgaagaagtatttcggtatgtaaagctctatcagcagggaagatgatgacggtacctgactaagaagccccgg

SEQ ID NO: 7277 - DNA, 490 bp, unidentified
  misc_feature 1..490: note = Ascusbbf_117769, encodes 16S rRNA
  source 1..490: mol_type = genomic DNA
agagtttgatcatggctcaggatgaacgctggcggcgtgcttaacacatgcaagtcgaacggagttttgatgtgagcgagaggtagcttgctattaatcaatcttttcaaaacttagtggcggacgggtgagtaacgcgtgggtaacctgccctgtacagggggataacagttggaaacgactgctaacaccgcataacatcgcgagggcgcatgaccttgcgatcaaatatttataggtacaggatgggcccgcgtctgattagctagatggtgaggtaacggcccaccatggcgacgatcagtagccgtactgagaggtagaacggccacattgggactgagacacggcccaaactcctacgggaggcagcagtggggaatattggtcaatgggggcaaccctgaaccagcgacgccgcgtgagtgaagaagtatttcggtatgtaaagctctatcagcagggacgatgatgacggtacctgactaag

SEQ ID NO: 7278 - DNA, 490 bp, unidentified
  misc_feature 1..490: note = Ascusbbf_398942, encodes 16S rRNA
  source 1..490: mol_type = genomic DNA
agagtttgatcatggctcaggatgaacgctggcggcgtgcttaacacatgcaagtcgaacgaggaattattcaacgttttcggacagagagttattccgagtggcggacgggtgagtaacgcgtgggtaacctgccgtatgcagggggacaacagccggaaacagctgctaataccgcataagccggcggggccgcatggcccagccggaaaagatttatcggcatacgatggacccgcgtctgattagccagttggtgaggtaacggcccaccaaagcgacgatcagtagccgaactgagaggttgaccggccacattgggactgagacacggcccagactcctacgggaggcagcagtggggaatattgcacaatggggggaaccctgatgcagcaacgccgcgtgagtgaagaagtatttcggtatgtaaagctctatcagcagggaagaggttgacggtacctgcataagaagccccggctaacta

SEQ ID NO: 7279 - DNA, 490 bp, unidentified
  misc_feature 1..490: note = Ascusbbf_299420, encodes 16S rRNA
  source 1..490: mol_type = genomic DNA
agagtttgatcctggctcaggatgaacgctggcggcgtgcctaacacatgcaagtcgaacggttaaggcatcttcggatgcgaatagagtggcgaacgggtgagtaacacgtgaccaacctgccccccgcaccgggacaacgggcggaaacgcctgctaataccggatactccgcgacggacgcctgtccggcgcgggaaagcccaggcggcgggggatggggtcgcggcccatcagctagacggcggggtgacggcccaccgtggcgactacgggtagccgggttgagagaccgaccggccacattgggactgagacacggcccagactcctacgggaggcagcagtggggaatattgcgcaatgggcgcaagcctgacgcagcaacgccgcgtgcgggaaggaggccttcgggtcgtaaaccgctttcatcggggaagacgtcgactgtacccgaggaagaagccccggctaaatacgtgccagcagc

SEQ ID NO: 7280 - DNA, 490 bp, unidentified
  misc_feature 1..490: note = Ascusbbf_193295, encodes 16S rRNA
  source 1..490: mol_type = genomic DNA
agagtttgatcctggctcagagttaacgctggcatcgtgcataacacatgcaagtcgaacgggacttagttcttcggaattaagtttagtggcagacgggtgagtaatgtatgagaaacctacctttgagtggggaataacggtccgaaaggattgctaataccccataacatctttgagtggcatcacttaaagattaaagatttatcgcttgaagacggtctcatattccatcagctagttggcagtgtaacggactaccaaggcaacgacggatagccggcctgaaagggcgaccggccacaagggcactgagacacgggccctactcctacgggaggcagcagtggggaattttggtcaatgggcgaaagcctgaaccagcaacgatgcgtggaggatgaaggttctcggattgtaaactccttttgtgagggaagaaaaaaatgacggtacctcacgaataagccacggctaactacgtgccagc

SEQ ID NO: 7281 - DNA, 490 bp, unidentified
  misc_feature 1..490: note = Ascusbbf_287179, encodes 16S rRNA
  source 1..490: mol_type = genomic DNA
agagtttgatcctggctcaggatgaacgctggcggcatgcctaagacatgcaagtcgaacgaagtggcccaacaaaaactgagtgcttgcacaaggttggcgatggaatttccacttagtggcagacgggtgagtaacacgtaagtaatctacctcggagactggaataatgtttggaaacggacactaataccggataattcatatttagacaactggatatgctaaaaggagcgtttgctccacttcgagatgagcttgcggcgtattaactagttggtggggtaatggcctaccaaggtgacgatgcgtagccgaactgagaggttgatcggccacattgggactgagacacggcccaaactcctacgggaggcagcagttaggaatattcgtcaatggaggaaactctgaacgagcaatgccgcgtgagtgatgacggtctttatgattgtaaaactctgttgtaaggaacgaacccttgggatag

SEQ ID NO: 7282 - DNA, 490 bp, unidentified
  misc_feature 1..490: note = Ascusbbf_164423, encodes 16S rRNA
  source 1..490: mol_type = genomic DNA
agagtttgatcctggctcaggatgaacgctagcggcaggcctaacacatgcaagtcgaggggtaggagacttcggtttctgagaccggcgcacgggtgcgtaacacgtatgcaatctaccttgtacagagggatagcccggagaaattcggattaatacctcatagtattatagagtggcatcattttatgattaaagatttatcggtacaagatgagcatgcgtcccattagttagttggtgtggtaacggcacaccaagacgatgatgggtaggggtcctgagagggagatcccccacactggtactgagacacggaccagactcctacgggaggcagcagtgaggaatattggtcaatggaggcaactctgaaccagccatgccgcgtgcaggaagaaggttctatggattgtaaactgcttttatacaggaagaaattatccctcgtgagggagcttgacggtactgtacgaataaggatcggcta

SEQ ID NO: 7283 - DNA, 490 bp, unidentified
  misc_feature 1..490: note = Ascusbbf_1798795, encodes 16S rRNA
  source 1..490: mol_type = genomic DNA
agagtttgatcctggctcaggacaaacgctggcggcgtgcctaacacatgcaagtcgaacgaagcaccggggaaagagacttcggtcaattgaagcggtgacttagtggcggacgggtgagtaatgcatgagcaacctgccctggagagggggacaacagctggaaacggctgctaataccgcataatactgacgggaggcatcttttgtcagtcaaagatttatcgctctgggatgggctcatgtctgattagttagttggcggggcaacggcccaccaagacttcgatcagtagccggactgagaggttgaacggccacattgggactgagatacggcccagactcctacgggaggcaacagtggggaatattgggcaatgggcgcaagcctgacccagcaacgccgcgtgaaggaagaaggctttcgggttgtaaacttcttttatcagggacgaaggatgtgacggtacctgatgaataagccacg

SEQ ID NO: 7284 - DNA, 490 bp, unidentified
  misc_feature 1..490: note = Ascusbbf_93394, encodes 16S rRNA
  source 1..490: mol_type = genomic DNA
agagtttgatcatggctcaggatgaacgctggcggcgtgcctaatacatgcaagtcgaacgaggtggatgggagcttgctccttgatacctagtggcgaacgggtgagtaacacgtaggtaacctgcctttcagtttgggatacccagaggaaactttggctaataccaaattattccattcaaggcatcttggatggctaaaaggggcctttaaagcctcgctgatcgatggacctgcggagcattagttagttggtgagataacagcccaccaagacgaggatgcttagccgacctgagagggtgaacggccacactggaactgagacacggtccagactcctacgggaggcagcagtagggagttttcgtcaatgggcgcaagcctgaacgagcaacgccgcgtgaacgatgaaggccttcgggtcgtaaagttctgttgtgagggaaaaatgatagcttgaggaaatgctggctatttgatggtac

SEQ ID NO: 7285 - DNA, 490 bp, unidentified
  misc_feature 1..490: note = Ascusbbf_225780, encodes 16S rRNA
  source 1..490: mol_type = genomic DNA
agagtttgatcatggctcaggacgaacgctggcggcgtgcttaacacatgcaagtcgaacgaagcttgatttcggaatccttcgggatgaagaatgatatgacttagtggcggacgggtgagtaacgcgtgagtaacctgcctttcagaggggaataacgtttggaaacgaacgctaataccgcataacatcacgatgtcgcatggcaatgtgatcaaagatttatcgctgaaagatggactcgcgtccgattaggtagttggtagggtaacggcctaccaagccgacgatcggtagccggactgagaggttgaacggccacattgggactgagacacggcccagactcctacgggaggcagcagtggggaatattgcacaatgggcgcaagcctgatgcagcaacgccgcgtgagggaagacggtcttcggattgtaaacctttgtctttggtgaagaagaaagtgacggtagccaaggaggaagccac

SEQ ID NO: 7286 - DNA, 490 bp, unidentified
  misc_feature 1..490: note = Ascusbbf_204438, encodes 16S rRNA
  source 1..490: mol_type = genomic DNA
agagtttgatcctggctcaggacgaacgctggcggcgtgcttaacacatgcaagtcgaacgagggttatttggtagcttgctactgggtaattcgagtggcggacgggtgagtaacgcgtgaataatctgtcctatacagggggataacgcatcgaaagatgtgctaataccgcgtaggaccacgatgtcgcatggcattgaggtgaaaggagcaatccagtatagggtgagttcgcgtctgattagatagttggtgaggtaacggcttaccaagtcaacgatcagtagccgacctgagagggtgatcggccacattgggactgagacacggcccagactcctacgggaggcagcagtggggaatattgggcaatgggcgaaagcctgacccagcaacgccgcgtgaaggaagaaggttttcggattgtaaacttctgtcctatgtgaagagtggtagacggtagcataggaggaagccccggctaacta

SEQ ID NO: 7287 - DNA, 490 bp, unidentified
  misc_feature 1..490: note = Ascusbbf_350670, encodes 16S rRNA
  source 1..490: mol_type = genomic DNA
agagtttgatcctggctcaggacgaacgctggcggcgtgcctaacacatgcaagtcgagcggggacttattggatgagagcttcggcaggattccggtaagttctagcggcggacgggtgagtaacgcgtgagcaatctgtctcagacagggggataacgcagcgaaagttgcactaataccgcatgagaccacagagccgcatggcttaggggtcaaaggagtaatccggtctgaggtgagctcgcgtcctattaggtagttggtgaggtaacggcccaccaagcctacgataggtagccgacctgagagggtgatcggccacactggaactgagacacggtccagactcctacgggaggcagcagtggggaatattgggcaatgggcgaaagcctgacccagcaacgccgcgtgagtgaagaaggtcttcggattgtaaatctctgtcctaagagaagaggggaagacggtatcttaggaggaagccc

SEQ ID NO: 7288 - DNA, 490 bp, unidentified
  misc_feature 1..490: note = Ascusbbf_709478, encodes 16S rRNA
  source 1..490: mol_type = genomic DNA
agagtttgatcatggctcaggatgaacgctggcggcgtgcctaacacatgcaagtcgagcgggaaattgcggaaataagcttcggcagaaataagcgatggatagcggcggacgggtgagtaacgcgtaggtaagctgccccgtgcagagggatagcctagggaaacctggattaataccacataatgcggaggggtcacatggctccatcgccaaagatttatcggcatgggatgcacctgcgtctgattagatagttggtagggtaacggcctaccaagtcaacgatcagtagccgacctgagagggtaatcggccacattggaactgagacacggtccaaactcctacgggaggcagcagtggggaatattgcacaatgggcgcaagcctgatgcagcaacgccgcgtgagtgatgaaggtcttcgggtcgtaaaactctgtccttggggacgaaggaagtgacggtacccaaggaggaagccccgg

SEQ ID NO: 7289 - DNA, 490 bp, unidentified
  misc_feature 1..490: note = Ascusbbf_383825, encodes 16S rRNA
  source 1..490: mol_type = genomic DNA
agagtttgatcatggctcaggataaacgctggcggcgtgcttaacacattcaagtcgaacggacaaaggggggcttgccccccggcgttagtggcggacgggtgagtaacgcgtgagcaacctgcctttctccgggggataacattgggaaaccggtgctaataccgcataaagcagccatgtcacatggcgaggctgccaaaggagcaatttggggaaagatgggctcgcgtctgattaggtagttggtggggtaacggcctaccaagccgacgatcagtagccggactgagaggttgaacggccacattggaactgagatacggtccagactcctacgggaggcagcagtggggaatattgggcaatgggcgaaagcctgacccagcgacgccgcgtgaaggaagaaggtcttcggattgtaaacttttgtcagcagggaagaagaaagtgacggtacctgctaagaaagccacggctaactacgtgc

SEQ ID NO: 7290 - DNA, 490 bp, unidentified
  misc_feature 1..490: note = Ascusbbf_1788959, encodes 16S rRNA
  source 1..490: mol_type = genomic DNA
agagtttgatcatggctcaggacgaacgctggcggcgtgcctaacacatgcaagtcgagcggggatattggaagagcatgctcggaagatatcttagcggcggacgggtgagtaacgcgtgagcaacctgtcccagacagggggataccagatggaaacatctgctaataccgcataagaccacagtttcgcatgggacagtggtaaaaggagcaatccggtttggggtgggctcgcgtccgattagctggttggtgaggtaacggcccaccaaggcgacgatcggtagccgacctgagagggtgatcggccacattggaactgagacacggtccaaactcctacgggaggcagcagtggggaatattgggcaatgggcgaaagcctgacccagcaacgccgcgtgagggaagaaggttttcggattgtaaacctctgtcctaagcgacgaaggaagtgacggtagcttaggaggaagccccggctaact

SEQ ID NO: 7291 - DNA, 490 bp, unidentified
  misc_feature 1..490: note = Ascusbbf_1479486, encodes 16S rRNA
  source 1..490: mol_type = genomic DNA
agatggctcaggacaaacgctggcggcgtgcctaacacatgcaagtcgaacgaagcactgtggaaagagacttcggtcaattgaagctttgacttagtggcggacgggtgagtaatgcatgagcaacctgccctggagagggggacaacagctggaaacggctgctaataccgcatgaagttgcggggaggcatcttcctgcaaccaaagatttatcgctctgggatgggctcatgtctgattagatagttggcggggtaacggcccaccaagtctgcgatcagtagccggactgagaggttgaacggccacattgggactgagatacggcccagactcctacgggaggcagcagtggggaatattgggcagtgggcgcaagcctgacccagcaacgccgcgtgaaggaagaaggctttcgggttgtaaacttcttttatcagggacggagaacgtgacggtacctgatgaataagccacggctaactac

SEQ ID NO: 7292 - DNA, 490 bp, unidentified
  misc_feature 1..490: note = Ascusbbf_133391, encodes 16S rRNA
  source 1..490: mol_type = genomic DNA
agagtttgatcatggctcaggacgaacgctggcggcgcgcctaacacatgcaagtcgaacggagttaagggagcttgctctcttaacttagtggcggacgggtgagtaacacgtgagcaacctgcctttcagagggggacaacagttggaaacgactgctaataccgcataacatcatcggacggcatcgtctgatgatcaaagatttatcgctgaaagatgggctcgcgtctgattagatagttggtgaggtaacggcccaccaagtcgacgatcagtagccggactgagaggttgaacggccacattgggactgagacacggcccagactcctacgggaggcagcagtgggggatattggacaatgggggcaaccctgatccagcgacgccgcgtgagggaagaaggttttcggattgtaaacctctgttgacagggaagaaaatgacggtacctgttaagaaagccacggctaactacgtgccagca

SEQ ID NO: 7293 - DNA, 490 bp, unidentified
  misc_feature 1..490: note = Ascusbbf_300190, encodes 16S rRNA
  source 1..490: mol_type = genomic DNA
agagtttgatcctggctcagaacgaacgctggcggcatggattaggcatgcaagtcgaacgccgatagcaatatcggagtggcgcaagggtgaggaacacgtgagtaatctgccctcgagttgggaatagctccgggaaactggaattaataccgaataatattgtgagaccgcatggtcttgcacttaaagcagcaatgcgctcgaggaggagctcgcgtcccattagctagttggtgaggtaacggcccaccaaggccatgatgggtagctggtctgagaggacgatcagccacagtgggactgagaactgcccacactcctacgggaggctgcagtcgagaattttgggcaatgggcgaaagcctgacccagcaatgccgcgtgcgggacgaaggtcttcggattgtaaaccgctgtcaagagggacgaaatttgacggtacctctgaaggaagccacggctaactacgtgccagcagccgcggtaa

SEQ ID NO: 7294 - DNA, 490 bp, unidentified
  misc_feature 1..490: note = Ascusbbf_268711, encodes 16S rRNA
  source 1..490: mol_type = genomic DNA
agagtttgatcatggctcagaacgaacgctggcggcgcgtcttaagcatgcaagtcgaacgggatcatccagcttgctggatgtgagagtggcggactggtgagtaacacgtgggtgacgtacccttgagacggggatagccggtagaaataccgggtaataccggatgtgaagtgtggtcttggaagccatactggaaaggagcttttgctccgctcgaggaacggcctgcgtcctatcagctagttggtgaggtaaaggcccaccaaggcaatgacaggtatccggccttagagggtaatcggacacattgggactgagatacggcccagactcctacgggaggcagcagctaagaatattccgcaatggacgaaagtctgacggagcgacgccgcgtggatgatgaaggccgtgaggttgtaaaatccttttataacagaggaataagcagaagagtggaatgcttctgtggtgactgtaagttatg

SEQ ID NO: 7295 - DNA, 490 bp, unidentified
  misc_feature 1..490: note = Ascusbbf_910321, encodes 16S rRNA
  source 1..490: mol_type = genomic DNA
agagtttgatcctggctcagaacgaacgctggcggcgcgtcttaaccatgcaagtcgagcgggaatatggggcttgccctatatgagagcggcggactggtgagtaacacgtgggtgatgtacctttcggacggggacagcctgtagaaatacggggtaataccggatacgatccatagagtggagtttatggaagaaaggagcttcggctccgccgaaagatcggcctgcggcccatcagctagacggcgaggtaacggctcaccgtggcgacaacgggtatccggcctgagagggtggacggacacattgggactgagatacggcccagactcctacgggaggcagcaggtaagaatattccgcaatggaggaaactctgacggagcgacgccgcgtgtgcgaagaaggccggaaggttgtaaagcactttggtggtcgaagaataaagtgggtagggaatgacctacagatgacggtagaccaagaa

SEQ ID NO: 7296 - DNA, 490 bp, unidentified
  misc_feature 1..490: note = Ascusbbf_721214, encodes 16S rRNA
  source 1..490: mol_type = genomic DNA
agagtttgatcatggctcaggacgaacgctggcggcgtgcttcatacatgcaagtcgaacgagaagctgacttcggtcagtggaaagtggcggacgggtgagtaatatgtaggaaatctgcctttaggtgggggacaacagagggaaacttctgctaataccccatatgagctatcttgaaatagatatcttgaaaactctggtgcctagagatgagcctgcatctgattagctagttggtggtgtaatggactaccaaggcgacgatcagtagctggtttgagaggatgatcagccacaatgggactgagacacggcccatactcctacgggaggcagcagtagggaattttgcgcaatgggcgaaagcctgacgcagcaacgccgcgtgaacgattaagcccttcggggtgtaaagttctgtcagtggggacgaaatatgacggtacccacagaggaagcaccggctaactccgtgccagcagccgcg

SEQ ID NO: 7297 - DNA, 490 bp, unidentified
  misc_feature 1..490: note = Ascusbbf_52642, encodes 16S rRNA
  source 1..490: mol_type = genomic DNA
agagtttgatcctggctcaggatgaacgctggcggcgtgcctaatacatgcaagtcgagcgaggtagcttgctacctagcggcgaacgggtgagtaacacgttggtaatctacctttcagttggggatacccagaggaaactttggctaataccgtaatacgtaataaggtgaaattccttattataaaaggcccttttgggtcgctgatagatgagcctgcgtctgattagctagttggtgagataatagcccaccaaggcgaggatcagtagccgatctgagaggatgaacggccacaatggaactgagacacggtccatactcctacgggaggcagcagtagggagttttcgacaatgggggcaaccctgatcgagcaacgccgcgtgtgtgatgaaggtcttcggattgtaaagcacttttataagggataaatggtattgatagtggaaagattaatatttgatagtaccttatgaataagtaac

SEQ ID NO: 7298 - DNA, 490 bp, unidentified
  misc_feature 1..490: note = Ascusbbf_381065, encodes 16S rRNA
  source 1..490: mol_type = genomic DNA
agagtttgatcatggctcaggatgaacgctggcggcatgcctaagacatgcaagtcgaacgaagtggcccaatgaaaatggagtacttgtacaaaattggatttggatttccacttagtggcagacgggtgagtaacacgtaagtaacctacctttaagactgggataacgtttggaaacgaacgctaataccggacaattcatttttagataactagaaatgctaaaagaagcgtttgcttcacttaaagatgggcttgcggcgtattaactagttggtggggtaatggcctaccaaggtgacgatgcgtagccgggctgagaggctaatcggccacattgggactgagacacggcccaaactcctacgggaggcagcagttaggaatattcgtcaatggaggaaactctgaacgagcaatgccgcgtgagtgatgacagtcttatagattgtaaaactctgttgtaaaggaagaaccctcactatagg

SEQ ID NO: 7299 - DNA, 490 bp, unidentified
  misc_feature 1..490: note = Ascusbbf_34909, encodes 16S rRNA
  source 1..490: mol_type = genomic DNA
agagtttgatcctggctcaggatgaacgctagctacaggcttaacacatgcaagtcgcggggcagcatgactttagcttgctaaggttgatggcgaccggcgcacgggtgagtaacgcgtatccaacctgcccatgtctcggggatagcccgctgaaaggcggattaatacccgattcggtcgtttgacggcatccgattacgaccaaaggcttttgtcggacatggatggggatgcgtctgattaggtagtcggcggggtaacggcccaccgagcctatgatcagtaggggttctgagaggaaggtcccccacactggtactgagacacggaccagactcctacgggaggcagcagtgaggaatattggtcaatgggcgcgagcctgaaccagccaagtagcgtgcaggatgactgccctatgggttgtaaactgcttttatgcggggataacatgcgccacttgtggcgcactgcaggtaccgcatga

SEQ ID NO: 7300 - DNA, 490 bp, unidentified
  misc_feature 1..490: note = Ascusbbf_2433, encodes 16S rRNA
  source 1..490: mol_type = genomic DNA
agagtttgatcatggctcaggacgaacgctggcggcatgcctaacacatgcaagtcgaacggagctgagaagcttgcttttcagcttagtggcggacgggtgagtaacgcgtgagcaacctgcctttcagtggggaataatatcctgaaaagggtactaataccgcataacgtattgaagccgcatgactttgataccaaagatttatcgctgagagatgggctcgcgtccgattagccagttggtggggtaacggcctaccaaagctacgatcggtagccggactgagaggttgaacggccacattgggactgagacacggcccagactcctacgggaggcagcagtgggggatattgcgcaatgggggaaaccctgacgcagcaatgccgcgtgaaggatgaaggtcttcggattgtaaacttcttttgtcagggacgaaaattgacggtacctgacgaataagctccggctaactacgtgccagcag

SEQ ID NO: 7301 - DNA, 490 bp, unidentified
  misc_feature 1..490: note = Ascusbbf_189987, encodes 16S rRNA
  source 1..490: mol_type = genomic DNA
agagtttgatcctggctcaggatgaacgctagcgacaggcctaacacatgcaagtcgaggggcagcgagaggaaagcttgcttttcttgtcggcgaccggcgcacgggtgagtaacgcgtatgcaacctggctactgctacgggatagccttgcgaaagtaagattaataccgtatgtgatatttagagacatctccttatattgaaagatttatcggcagtagatgggcatgcgtctgattagttagttggcggggtaacggcccaccaaggcatcgatcagtaggggttctgagaggaaggtcccccacattggaactgagacacggtccaaactcctacgggaggcagcagtgaggaatattggtcaatggacggaagtctgaaccagccaagtcgcgtgaaggaagacggttctatggattgtaaacttcttttgctcgagggtaaagtgtggtacgtgtaccatattgcaagtatcgagtgaata

SEQ ID NO: 7302 - DNA, 488 bp, unidentified
  misc_feature 1..488: note = Ascusbbf_405652, encodes 16S rRNA
  source 1..488: mol_type = genomic DNA
agagtttgatcctggctcagaacgaacgctggcggcaggcttaacacatgcaagttgagcgggattgattgatagcttgctattaatcatgagagcagcgcactggtgagtaacacgtgggaatatacctattggtgggggacaacaattggaaacgattgctaataccgcataagccctgagggggaaagatttattgccgatagattagcccgcggaagattaggtagttggtggggtaatggcctaccaagccgacgatctatagctggtctgagaggacgatcagccacattggaactgagacacggtccagactcctacgggaggcagcagtggggaatattgggcaatggaggcaactctgacccagccatgccgcgtgagtgaagaaggttttcggattgtaaagctctttcggacaggaagataatgacggtactgtctaaagaagccccggctaacttcgtgccagcagccgcggtaat

SEQ ID NO: 7303 - DNA, 490 bp, unidentified
  misc_feature 1..490: note = Ascusbbf_125244, encodes 16S rRNA
  source 1..490: mol_type = genomic DNA
agagtttgatcctggctcagaacgaacgctggcggcgtggattaggcatgcaagtcgtacgcgaaagccaccttcgggtggttagtagagtggcgaactggtgagtacaaggtgactaacctgcccttgagtgggggataacgtcgggaaaccggcgctaataccgcatggtctcttagcctttcgaggttacgagtaaagcagcaatgcgctcaaggatggggtcaccccccattagcttgttggtagggtaacggcctaccaaggctacgatgggtagctggactgagaggttggccagccacactgggactgagatacggcccagactcctacggggggcagcagtctagaggctttgacaatgcccgaaagggtgatcaagcgacgccgcgtgtgggatgaatgtcttcggattgtaaaccacttttgtttgggaagaaggcttgtatcgtgaatatgagattgacggtaccaaacgaataagccc

SEQ ID NO: 7304 - DNA, 490 bp, unidentified
  misc_feature 1..490: note = Ascusbbf_43408, encodes 16S rRNA
  source 1..490: mol_type = genomic DNA
agagtttgatcatggctcaggatgaacgctggcggcgtgcttaacacatgcaagtcgaacgaagcacatatgaaacgcaagtggaatgtgtgacttagtggcggacgggtgagtaacgcgtgggcaacctaccttgcacagggggataacagttggaaacgactgctaaaaccgcataacatggcgataccgcatgacattgccatcaaatatttataggtgtgagatgggcccgcgtctgattagctagttggtgaggtaacggcccaccaaggcgacgatcagtagccggcttgagagagtgaacggccacattgggactgagacacggcccaaactcctacgggaggcagcagtgggggatattggacaatgggggaaaccctgatccagcgacgccgcgtgagtgaagaagtatttcggtatgtaaagctctatcagcagggaagaaaaagcgcaagcattgactgtacctgactaagaagccccg

SEQ ID NO: 7305 - DNA, 490 bp, unidentified
  misc_feature 1..490: note = Ascusbbf_710566, encodes 16S rRNA
  source 1..490: mol_type = genomic DNA
agagtttgatcatggctcaggacgaacgctggcggcgtgcctaatacatgcaagtcgagcggacagaagggagcttgctcccggacgttagcggcggacgggtgagtaacacgtgggcaacctgccccttagactgggataactccgggaaaccggagctaataccggataatccctttctccacctggagagagggtgaaagatggcttcggctatcactaggggatgggcccgcggcgcattagctagttggtaaggtaacggcttaccaaggcgacgatgcgtagccgacctgagagggtgatcggccacactgggactgagacacggcccagactcctacgggaggcagcagtagggaatcttccgcaatggacgaaagtctgacggagcaacgccgcgtgagtgaggaaggccttcgggtcgtaaagctctgttgtgagggaagaagcggtaccgttcgaatagggcggtaccttgacggtacct

SEQ ID NO: 7306 - DNA, 490 bp, unidentified
  misc_feature 1..490: note = Ascusbbf_590317, encodes 16S rRNA
  source 1..490: mol_type = genomic DNA
agagtttgatcctggctcaggatgaacgctggcggcgtgcttaacacatgcaagtcgaacggagctgctttgaaagaggattcgtccaattgatgagtatgcttagtggcggacgggtgagtaacgcgtgagtaacctgccttggagtggggaataacacagtgaaaattgtgctaataccgcatgatgcagttgggtcgcatgactctgactgccaaagatttatcgctctgagatggactcgcgtctgattagatagttggcggggtaacggcccaccaagtcgacgatcagtagccggactgagaggttggccggccacattgggactgagacacggcccagactcctacgggaggcagcagtggggaatattgggcaatgggcgcaagcctgacccagcaacgccgcgtgaaggaagaaggctttcgggttgtaaacttcttttctcagggacgaagcaagtgacggtacctgaggaataagccac

SEQ ID NO: 7307 - DNA, 490 bp, unidentified
  misc_feature 1..490: note = Ascusbbf_174006, encodes 16S rRNA
  source 1..490: mol_type = genomic DNA
agagtttgatcatggctcagaacgaacgctggtagcgtggattaggcatgcaagtcgaacgggatcggctggatagcaatattcggccgtgagagtggcggattggggaggaacacgtgagcaacctgcccttgagttggggaaaaccgttggaaacgacggctaataccggatgtggcgcctgacggcatcgttggagcgctaaagggggccgcaaggctctcgctcgaggaggggctcgcgcaccatcagctagttggcggggtaacggcccaccaaggcttacggttagctggtctgagaggatgaccagccccactgggactgagatactgcccagactcctacgggaggctgcagtcgaggatcatttgcaatgggcgaaagcctgacaatgcgacgctgcgtggaggatgaaggccttcgggttgtaaactcctgtcatgagggaacaggcgatgatacccaatacgtatcaaagttgagtgta

SEQ ID NO: 7308 - DNA, 490 bp, unidentified
  misc_feature 1..490: note = Ascusbbf_825000, encodes 16S rRNA
  source 1..490: mol_type = genomic DNA
agagtttgatcatggctcagattgaacgctggcggcaggcctaacacatgcaagtcgaacggacgagaggagcttgctcctcaagttagtggcggacgggtgagtaacacgtgagcaacctgcccttcggagggggacaacagctggaaacggctgctaataccgcatgatacagtctggaggcatctccgggctgtcaaagattttatcgccgaaggatgggctcgcgtctgattagatagttggtggggtaacggcccaccaagtcgacgatcagtagccggactgagaggttgaacggccacattgggactgagatacggcccagactcctacgggaggcagcagtggggaatattgggcaatgggggcaaccctgacccagcaacgccgcgtggaggaagaaggctttcgggttgtaaactcctttgacgagggacgatagtgacggtacctcgaaaacaagccacggctaactacgtgccagcag

SEQ ID NO: 7309 - DNA, 490 bp, unidentified
  misc_feature 1..490: note = Ascusbbf_52872, encodes 16S rRNA
  source 1..490: mol_type = genomic DNA
agagtttgatcatggctcaggacgaacgctggcggcacgcttaacacatgcaagtcgaacggtgaagagtagcttgctacttggatcagtggcggacgggtgagtaacacgtgagcaatctgcctctaagtggggaataacgactggaaacggtcggtaataccgcataacatagccgaaccgcatgatttggttatcaaagatttatcgcttagagatgagctcgcgtctgattagctagttggtgaggtaacggcccaccaaggcgacgatcagtagccggactgagaggttgaacggccacattgggactgagacacggcccagactcctacgggaggcagcagtggggaatattgcacaatgggcgcaagcctgatgcagcgatgccgcgtgagggaagaaggttttcggattgtaaacctctgttgacagggacgataatgacggtacctgttcagaaagctccggctaactacgtgccagcagc

SEQ ID NO: 7310 - DNA, 490 bp, unidentified
  misc_feature 1..490: note = Ascusbbf_208206, encodes 16S rRNA
  source 1..490: mol_type = genomic DNA
agagtttgatcatggctcaggatgaacgctagctacaggcttaacacatgcaagtcgcggggcagcatgagggttgcttgcaattcttgatggcgaccggcgtacgggtgagtaacgcgtatccaacctgcccatcactacgggataacccgttgaaaggcggactaataccgtatgatatcgtctgatggcatcagatgacgattaaaggtttggcggtgatggatggggatgcgtctgattaggtagttggtaaggtaacggcttaccaagccttcgatcagtaggggttctgagaggaaggtcccccacattggaactgagacacggtccaaactcctacgggaggcagcagtgaggaatattggtcaatgggcgagagcctgaaccagccaagtagcgtgcaggatgacggccttatgggttgtaaactgcttttatacggggataaatgacgccacgcgtggtgttttgcaggtaccgtatgaat

SEQ ID NO: 7311 - DNA, 490 bp, unidentified
  misc_feature 1..490: note = Ascusbbf_11016, encodes 16S rRNA
  source 1..490: mol_type = genomic DNA
agagtttgatcatggctcaggatgaacgctggcggcgtgcataacacattcaagtcgaacggactgattttgtagcttgctacggatgaaagttagtggcggacgggtgagtaacgcgtgagcaacctgcctctgtgtgtgggataccgtctggaaacggacgttaataccgcatgacccatatggatcgcatgttttgtatggcaaagatttattgcacagagatgggctcgcgtctgattaggcagttggtgaggtaacggcccaccaaacctacgatcagtagccggactgagaggttgaacggccacattggaactgagaaacggtccagactcctacgggaggcagcagtggggaatattgggcaatgggcgaaagcctgacccagcgacgccgcgtgaaggaagacggtcctcggattgtaaacttcttttatgagggacgataatgacggtacctcatgaataagccacggctaactacgtgc

SEQ ID NO: 7312 - DNA, 490 bp, unidentified
  misc_feature 1..490: note = Ascusbbf_301225, encodes 16S rRNA
  source 1..490: mol_type = genomic DNA
agagtttgatcatggctcaggatgaacgctagcggcaggcttaacacatgcaagtcgcggggcagcgcgctgtagcaatacggtggcggcgaccggcggaagggtgcgtaacacgtgagcaacctgcccgtgacagggggataaccggtggaaacgccgcctaataccccgtaacaacaatgcccgcatgggtgtcgtttgaaagctccggcagtcacggatgggctcgcgcagcattagctagtcggcggggtaacggcccaccgaggcgacgatgcttaggggttctgagaggaagatcccccacactgggactgagacacggcccagactcctacgggaggcagcagtgaggaatattggacaatgggggcaaccctgatccagccatgccgcgtgaaggactgaggccctacgggtcgtaaacttcttttgttgcggagcaataagggtcacgcgtggcccgatgagagtacgcagcgaataagca

SEQ ID NO: 7313 - DNA, 490 bp, unidentified
  misc_feature 1..490: note = Ascusbbf_91323, encodes 16S rRNA
  source 1..490: mol_type = genomic DNA
agagtttgatcctggctcaggacgaacgctggcggcgtgcttaacacatgcaagtcgagcggaaaggcccctttttggggtactcgagcggcgaacgggtgagtaacacgtgagtaatctgccctccacttcgggatagccctccgaaagggggattaataccggatggtcatcgcatgctgcatggtgtgtggtggaaagatttggttcggtgggggatgagctcgcggcctatcagcttgttggtggggtgttggcctaccaaggcttcgacgggtagccggcctgagagggtgaccggccacactgggactgagacacggcccagactcctacgggaggcagcagtggggaatattggacaatgggcggaagcctgatccagcaacgccgcgtgggggatgacggccttcgggttgtaaacctctttcagctccgacgaagttcctgctttttggtgggggtgacggtaggggcagaagaaggaccg

SEQ ID NO: 7314 - DNA, 490 bp, unidentified
  misc_feature 1..490: note = Ascusbbf_30653, encodes 16S rRNA
  source 1..490: mol_type = genomic DNA
agagtttgatcctggctcaggacgaacgctggcggcgtgcttaacacatgcaagtcgaacgaggttaagagaaggaagtcttcggatggaatttttttaatcgagtggcggacgggtgagtaacgcgtgaggaacctgtcttctacagggggataacggtccgaaaggattgctaataccgcataagaccacgaagccgcatggttttgaggtcaaaggagaaatccggtagaaggtggactcgcgtcccattagatagttggtgaggtaacggcccaccaagtcgacgatgggtagccgacctgagagggtgatcggccacattggaactgagatacggtccagactcctacgggaggcagcagtggggaatattgggcaatgggcgaaagcctgacccagcaacgccgcgtgagggaagaaggtcttcgggttgtaaacctctgtcctaagtgaaaagaaaggatggtagcttaggaggaagctccgg

SEQ ID NO: 7315 - DNA, 490 bp, unidentified
  misc_feature 1..490: note = Ascusbbf_5326, encodes 16S rRNA
  source 1..490: mol_type = genomic DNA
agagtttgatcatggctcaggatgaacgctggcggcaggcttaatacatgcaagtcgaacggtaaggccgagtgcagcaatgcatgaggtacacgagtggcgcacgggtgcgtaacgcgtatgcaacctgcccccaaccgggacaaaacagctggaaacggctgctaatatcccatggccacttgggagggcatcctcctgagtgtaaagattcattggttggggatgggcatgcgtattattaggtagttggcggggtaacggcccaccaagccgacgatgattaggggtcctgagagggttaacccccacactggaactgagacacggtccagactcctacgggaggcagcagtagggaatattgggcaatgggagcaatcctgacccagccatgccgcgtgaaggaagacggccctatgggttgtaaacttcttttgccgcagagtaaacctggggacgtgtccccagttgagagtatgcggcgaat

SEQ ID NO: 7316 - DNA, 490 bp, unidentified
  misc_feature 1..490: note = Ascusbbf_66057, encodes 16S rRNA
  source 1..490: mol_type = genomic DNA
agagtttgatcatggctcaggatgaacgctagcggcaggcttaacacatgcaagtcgaggggcagcgggtgtagcaatacatgccggcgaccggcgaaagggtgagtaacgcgtgagcaacatgcccgatactgggggatagtcgatggaaacgtcgcgtaataccccgtaacacaaatcttcgcatgggggtttgttgaaagattgattggtatcggattggctcgcgtgccattaggtagacggcggggtaacggcccaccgtgccgacgatggctaggggttctgagaggaaggtcccccacattggaactgagacacggtccagactcctacgggaggcagcagtgaggaatattggacaatggccggaaggctgatccagccatgccgcgtgcgggatgacggccctatgggttgtaaaccgcttttgcgggggagcaataaggtgcacgtgtgcaccgatgagagtaccctgcgaataagcatc

SEQ ID NO: 7317 - DNA, 490 bp, unidentified
  misc_feature 1..490: note = Ascusbbf_76482, encodes 16S rRNA
  source 1..490: mol_type = genomic DNA
agagtttgatcatggctcagaacgaacgctggcggcgcgtcttaagcatgcaagtcggacggcaagattagagcttgctctgatcctagagtggcggactggtgagtaacgcgtgggtgacgtacccttttgacggggatagcttttagaaataagagataataccggataagctctgcattgttagagggtgcagaggaaaggttctttagaaccgcgaaaggaacggcccgcgtactattagctggttggtgaggtaacggcccaccaaggcgatgatagttacccggcctaagagggtgatcgggcacattgggactgagatacggcccagactcctacgggaggcagcagctaagaatattccgcaatgcacgaaagtgtgacggagcgacgccgcgtggatgatgaaggccggaaggttgtaaaatccttttatacgtgaggaataagtggagtgagagaaacgcttcatggtgactgtagcgta

SEQ ID NO: 7318 - DNA, 490 bp, unidentified
  misc_feature 1..490: note = Ascusbbf_101806, encodes 16S rRNA
  source 1..490: mol_type = genomic DNA
agagtttgatcatggctcaggatgaacgctagcggcaggcttaacacatgcaagtcgaggggcagcgcggatagcaatatctggcggcgaccggcgaaagggtgcggaacacgtgagcaacttgcccgtgacagggggataagcgctggaaacggcgtctaataccccgtaacacaagggatggcatcgtcctttgttgaaagtcttcggatggtcacggatgggctcgcgcgacattaggtagacggcggggtaacggcccaccgtgccgacgatgtctaggggttctgagaggaaggtcccccacactggaactgagacacggtccagactcctacgggaggcagcagtgaggaatattggtcaatggccggaaggctgaaccagccatgccgcgtgcaggaataaggtcctatggattgtaaactgcttttatgtgggagcaataaggtctacgtgtagaccgatgagagtaccatatgaataagca

SEQ ID NO: 7319 - DNA, 490 bp, unidentified
  misc_feature 1..490: note = Ascusbbf_219043, encodes 16S rRNA
  source 1..490: mol_type = genomic DNA
agagtttgatcatggctcaggatgaacgctggcggcgtgcctaacacatgcaagtcgagcgagaaacttacagatgacgcttcggtcgattcagtaagcggaaagcggcggacgggtgagtaacgcgtaggcaacctgcccttcacacagggatagcctctggaaacggggattaaaacctgataacgcataactgttgcatatcagatatgccaaagatttatcggtgagggatgggcctgcgtctgattagttagttggtggggtaacggcctaccaaggcagcgatcagtagccgacctgggagggtgatcggccacattggaactgagacacggtccagactcctacgggaggcagcagtggggaatattgcacaatgggcgaaagcctgatgcagcaacgccgcgtgagcgatgaaggcctttgggtcgtaaagctctgtccttggggaagaaaaaaatgacggtacccttggaggaagccccgg

SEQ ID NO: 7320 - DNA, 490 bp, unidentified
  misc_feature 1..490: note = Ascusbbf_110689, encodes 16S rRNA
  source 1..490: mol_type = genomic DNA
agagtttgatcatggctcaggatgaacgctggcggcatgcctaagacatgcaagtcgaacgaggtgccccattgaagatgaagtgcttgcactgatttggatttggatcagcacctagtggcggacgggtgagtaacacgtgggtgatctacccttaagactggaatacctattggaaacgatagttaataccggataacacattaattcgttttaatgttgaaaggagcccttaaagctctgcttttggatgagcctgcggcgtattagttagttggtggggtaacggcctaccaagacgacgatgcgtagccgaactgagaggttgatcggccacattgggactgagacacggcccaaactcctacgggagacagcagttaggaatattcgtcaatgggggaaaccctgaacgagcaatgccgcgtgaacgatgaaggccctatgggttgtaaagttctgttatatgggaagaatggttagaatagga

SEQ ID NO: 7321 - DNA, 490 bp, unidentified
  misc_feature 1..490: note = Ascusbbf_120358, encodes 16S rRNA
  source 1..490: mol_type = genomic DNA
agagtttgatcctggctcaggatgaacgctggcggcgtgcttaatacatgcaagtcgaacggagtttagatgaaacctagtgattctaaacttagtggcggacgggtgagtaacgcgtgggtaacctgccctgtacagggggataacggttggaaacgaccgctaaaaccgcataacatcggaataccgcatgatgttccggtcaaatatttataggtacaggatgggcccgcgtctgattagctagttggcgaggtaacggcccaccaaggcgacgatcagtagccgtactgagaggtagaacggccacattgggactgagacacggcccaaactcctacgggaggcagcagtagggaatattggtcaatgggggaaaccctgaaccagcgacgccgcgtgagtgaagaagtatttcggtatgtaaagctctatcagcagggacgataatgacggtacctgactaagaagccccggctaactacgtgcc

SEQ ID NO: 7322 - DNA, 490 bp, unidentified
  misc_feature 1..490: note = Ascusbbf_656978, encodes 16S rRNA
  source 1..490: mol_type = genomic DNA
agagtttgatcatggctcaggatgaacgctggcggcgtgcctaatacatgcaagtcgaacggatcacttcggtgatcagtggcgaacgggtgagtaacacataaacaatctaccctgaagactgggataacggttggaaacgaccgctaataccggataggtgatcttaaggcatcttgagatcattaaagttgggctgcaacactgcaggatgagtttatgtcgcattagctagttggcggggcaacggcccaccaaggcgatgatgcgtagccggtctgagaggatgaacggccacattgggactgagacacggcccagactcctacgggaggcagcagtagggaattttcggcaatgggggaaaccctgaccgagcaacgccgcgtgaacgatgaaggtctttggattgtaaagttctgttacgagggaagaatggcttattcagggaatgggataagcagagacggtacctcgccagaaagccacg

SEQ ID NO: 7323 - DNA, 490 bp, unidentified
  misc_feature 1..490: note = Ascusbbf_37422, encodes 16S rRNA
  source 1..490: mol_type = genomic DNA
agagtttgatcctggctcaggacgaacgctggcggcgtgcttcatacatgcaagtcgaacgataaggttccttcgggaatacataagtggcggacgggtgagtaatatgtagagaatctgcctttaggcgggggacaacagagggaaacttctgctaataccccatatgagcgtagctgaaatgctattcttgaaagctccggcgcctagagatgagtctgcatctgattagctagttggcggtgtaatggaccaccaaggcgacgatcagtagctggtttgagaggatgatcagccacaatgggactgagacacggcccatactcctacgggaggcagcagtagggaattttgcgcaatgggcgaaagcctgacgcagcaacgccgcgtgatcgagaagcccttcggggtgtaaagatctgtcagtagggacgaaaaatgactgtacctacagaggaagcaccggctaactccgtgccagcagccgcgg

SEQ ID NO: 7324 - DNA, 490 bp, unidentified
  misc_feature 1..490: note = Ascusbbf_42296, encodes 16S rRNA
  source 1..490: mol_type = genomic DNA
agagtttgatcatggctcaggacgaacgctggcggcacgcttaacacatgcaagtcgaacgaacgaaggagagcttgctctccggagttagtggcggacgggtgagtaacacgtgagcaacctgccttcgagcgaggaataatggctggaaacggccactaatacctcataatgcagcggtaccgcatgatactgctgccaaagatttatcacttgaagatgggctcgcgtccgattagttagatggtgaggtaacggctcaccatgaccgcgatcggtagccgtactgagaggtagaacggccacattgggactgagacacggcccagactcctacgggaggcagcagtggggaatattgcacaatggaggaaactctgatgcagcgatgccgcgtgagggaagaaggctttcgggttgtaaacctctgttctcagggacgataatgactgtacctgaggagaaagctccggctaactacgtgccagca

SEQ ID NO: 7325 - DNA, 490 bp, unidentified
  misc_feature 1..490: note = Ascusbbf_490911, encodes 16S rRNA
  source 1..490: mol_type = genomic DNA
agagtttgatcctggctcaggatgaacgctggcggcgtgcttaacacatgcaagtcgaacgaagcacctctcccgaagattgacacagcttgctgtagattgattcatttgaggtgactgagtggcggacgggtgagtaacgcgtgggtaacctgcctcatagagggggacaacagttggaaacgactgctaataccgcatagtaagaaggattcgcatgttttcttcttgaaagatttatcgctatgagatggacccgcgtctgattagctagttggtaaggtaacggcctaccaaggcgacgatcagtagccggcttgagagagtgaacggccacattgggactgagacacggcccaaactcctacgggaggcagcagtggggaatattgcacaatgggggaaaccctgatgcagcgacgccgcgtgagtgaagaagtatttcggtatgtaaagctctatcagcagggaagataatgacggtacctga

SEQ ID NO: 7326 - DNA, 490 bp, unidentified
  misc_feature 1..490: note = Ascusbbf_36375, encodes 16S rRNA
  source 1..490: mol_type = genomic DNA
agagtttgatcatggctcaggatgaacgctggcggcgtgcttaacacatgcaagtcgaacgaagcattaggagcggatctttcgggtgaagcaccttttgacttagtggcggacgggtgagtaacgcgtgggcaacctgcccttaaccgggggacaacagttggaaacggctgctaataccgcataagcgcacggtatcgcatgatacagtgtgaaaaattccggtggttaaggatgggcccgcgttggattaggtagttggtgaggtaacggcccaccaagccgacgatccatagccgacctgagagggtgaccggccacattgggactgagacacggcccagactcctacgggaggcagcagtggggaatattgcacaatgggggaaaccctgatgcagcgacgccgcgtgagtgaagaagtatttcggtatgtaaagctctatcagcagggaagaagatgacggtacctgcacaagaagccccggct

SEQ ID NO: 7327 - DNA, 490 bp, unidentified
  misc_feature 1..490: note = Ascusbbf_76409, encodes 16S rRNA
  source 1..490: mol_type = genomic DNA
agagtttgatcatggctcaggatgaacgctggcggcgtgcttaacacatgcaagtcgaacggagtaccctagaaagaggcttcggccaatggaaaggaatacttagtggcggacgggtgagtaacgcgtgagcaacctgcctgggagtggggaataacacatcgaaagatgtgctaataccgcataatgcagagagatcgcatggtttttctgccaaagatttatcgctttcagatggactcgcgtctgattagctagttggtgaggtaacggctcaccaaggcgacgatcagtagccggactgagaggttgaccggccacattgggactgagacacggcccagactcctacgggaggcagcagtggggaatattgggcaatgggcgcaagcctgacccagcaacgccgcgtgaaggaagaaggctttcgggttgtaaacttctttgacaggggacgaagaacgtgacggtaccctgaaaacaagccacg

SEQ ID NO: 7328 - DNA, 490 bp, unidentified
  misc_feature 1..490: note = Ascusbbf_116666, encodes 16S rRNA
  source 1..490: mol_type = genomic DNA
agagtttgatcctggctcaggatgaacgctggcggcgtgcttaacacatgcaagtcgaacggggaaacaaaaaggaagttttcggatggaattattgttttctagtggcggacgggtgagtaacgcgtaaacaatctgccttagagagggggataacagatagaaatatctgctaataccgcataagaccacaagcaggcatctgcaaggggtaaaaggagcaatccgctttaagatgagtttgcgtactattagctagttggtgaggtaatggcccaccaaggcgacgatggttagccggcctgagagggtgaacggccacattggaactgagatacggtccagactcctacgggaggcagcagtgaggaatattgggcaatgggcgaaagcctgacccagcaacgccgcgtgaaggaagaaggttttaggattgtaaacttctgttgtaagggaaaaagaaagtgatggtaccttacgaggaagctac

SEQ ID NO: 7329 - DNA, 490 bp, unidentified
  misc_feature 1..490: note = Ascusbbf_11478, encodes 16S rRNA
  source 1..490: mol_type = genomic DNA
agagtttgatcatggctcaggacgaacgctggcggcgtgcttaacacatgcaagtcgtacgatgacccggctcttcggagctggtgattagtggcgaacgggtgagtaacacgtgggtgacctgccctgcactctgggataagcccgggaaactgggtctaatactggatacgaccagtggccgcatggtctgctggtggaaagcccttcggggtggtgtgggatgggcccgcggcctatcagcttgttggtggggtgatggcctaccaaggcgacgacgggtagccggcctgagagggtgtccggccacactgggactgagacacggcccagactcctacgggaggcagcagtgggaatcttgcacaatgggcgaaagcctgatgcagcgacgccgcgtgagggatgacggccttcgggttgtaaacctctttcggcagggaacaagcctgggggttttcttctgggtgagggtacctgcggaagaagc

SEQ ID NO: 7330 - DNA, 490 bp, unidentified
  misc_feature 1..490: note = Ascusbbf_38997, encodes 16S rRNA
  source 1..490: mol_type = genomic DNA
agagtttgatcctggctcaggatgaacgctagcgacaggcctaacacatgcaagtcgaggggcagcatggtcaaagcttgctttgactgatggcgaccggcgcacgggtgcgtaacaggtgtgcaatctgtccataatcggggaatagcccggcgaaagccgaattaaagctccatgtgccatcataccgcatggtaagatggtgaaacgttacggattatggatgagcacgcttctgattaggtagttggtgaggtaacggcccaccaagccgacgatcagtaggggttctgagaggaaggtcccccacattggaactgagacacggtccaaactcctacgggaggcagcagtgaggaatattggtcaatggacgagagtctgaaccagccaagtcgcgtgaaggaagacggttctatggattgtaaacttcttttgtccgagggtaaagttaggtacgtgtacctattggaaagtatcggacgaataa

SEQ ID NO: 7331 - DNA, 490 bp, unidentified
  misc_feature 1..490: note = Ascusbbf_41419, encodes 16S rRNA
  source 1..490: mol_type = genomic DNA
agagtttgatcctggctcaggacgaacgctggcggcgtgcttaacacatgcaagtcgaacgaagctgctttggagcttgctctagagtagacttagtggcggacggctgagtaacgcgtgagaaatctgccgtagtcagggggataacagatagaaatatctgctaataccgcataagaccacagtgccgcatggcataggggtaaaagagttatggatcggactacgatgatctcgcgtcctattagctagttggtgaggtaacggcccaccaaggcaacgataggtatccgacctgagagggtgatcggacagactggaactgagaaacggaccagactcctacgggaggcagcagtggggaatattgggcaatggaggcaactctgacccagcaacgccgcgtgaaggatgaaggtcttcggattgtaaacttttgatatagaggaagaagatagtgacggtactctataagaaagccccggctaac

SEQ ID NO: 7332 - DNA, 490 bp, unidentified
  misc_feature 1..490: note = Ascusbbf_1878396, encodes 16S rRNA
  source 1..490: mol_type = genomic DNA
agagtttgatcctggctcaggatgaacgctggcggcgtgcctaatacatgcaagtcgaacggcagcagcaatgctgtagtggcgaacgggtgagtaacacgttggtgacctgccccaaagatgggaatatcacctggaaacgggtggcaaaaccgaataagctcgagggagttagagagccttgagtaaaagagagatctactttgggaggggcctgcggcccatcagttagttggtgagggtaacggcccaccaagacggcgacgggtaggggacctgagagggtggtcccccacaatggaactgaaacacggtccatacacctgcgggtggcggcagtagggaatattgcttaatgggcgaaagcctgaagcagcaacgccgcgtggacgaaggaggccttcgggtcgtaaagtccttttataggggacgaattaagacggtaccttatgaataagctccggctaactacgtgccagcagccgcggta

SEQ ID NO: 7333 - DNA, 490 bp, unidentified
  misc_feature 1..490: note = Ascusbbf_829644, encodes 16S rRNA
  source 1..490: mol_type = genomic DNA
agagtttgatcctggctcaggatgaacgctggcggcgtgcctaacacatgcaagtcgagcggggatctaccgaatgagagcttcggcaggattttggtagattctagcggcggacgggcgagtaacgcgtgagcaatctgtctcagacagggggaaaacgcagcgaaagttgcactaataccgcatgagaccacagagccacatggctgaggggtcaaaggagcaatccggtctgaggtgagctcgcgtcctattaggtagttggtgaggtaacggcccaccaagccgacggtaggtagccgacctgagagggtgatcggccacactggaactgagacacggtccagactcctacgggaggcagcagtggggaatattgggcaatgggcgaaagcctgacccagcaacgccgcgtgagtgaagaaggccttcgggttgtaaatctctgtcctaagagaagaggggaagacggtatcttaggaggaagccc

SEQ ID NO: 7334 - DNA, 482 bp, unidentified
  misc_feature 1..482: note = Ascusbbf_3869, encodes 16S rRNA
  source 1..482: mol_type = genomic DNA
agagtttgatcatggctcagaacgaacgctggcggcacgcctaacacatgcaagtcggacggtatggatagcttgctattcatatagtggcggactggtgagtaatatgtaggaatctgcccataggttagggatagcatcgggaaactggtggtaatacctgataagctggagacaggaaaggagcaattcgccgatggaggagcctatatctgattagatagttggtggtgtaagagaccaccaagtcgatgatcggtagctgttctgagaggaagatcagccacattgggactgagatacggcccaaactcctacgggaggcagcagtggggaatattggacaatggaggaaactctgatccagcgatgccgcgtgagtgaagaaggccttcgggttgtaaagctcttttgtcagggacgatgatgacggtacctgaagaataagcaccggctaactctgtgccagcagccgcggtaat

SEQ ID NO: 7335 - DNA, 490 bp, unidentified
  misc_feature 1..490: note = Ascusbbf_13685, encodes 16S rRNA
  source 1..490: mol_type = genomic DNA
agagtttgatcatggctcaggatgaacgctagctacaggcttaacacatgcaagtcgaggggtaacattggcggagcttgctctgccagatgacgaccggcgcacgggtgagtaacgcgtatccaacctgcccatgggtcagggataaactcccgaaagggagcctaatacctgatgttgtgagaagaaggcctctgattttcacgaaagacttcggtcgccgatggatggggatgcgtacgattaggcagcaggcggggtaacggcccacctggccaacgatcgttaggggttctgagaggaaggtcccccacactggtactgagacacggaccagactcctacgggaggcagcagtgaggaatattggtcaatgggcggaagcctgaaccagccaagtagcgtgcaggatgactgccctatgggttgtaaactgcttttatgcggggataaagtgagccacgcgtggcttattgcaggtaccgcatga

SEQ ID NO: 7336 - DNA, 490 bp, unidentified
  misc_feature 1..490: note = Ascusbbf_225876, encodes 16S rRNA
  source 1..490: mol_type = genomic DNA
agagtttgatcctggctcagattgaacgctggcggcgtgcttaacacatgcaagtcgaacgcgaaagtggcttcggccacgagtagagtggcgcacgggtgagtaacgcgtggataatctgcctctgcaatcggaataacgactggaaacggtcgctaataccggatacgcttaagttttacctcttaaggaaagatgacctctatttataagttatcgtgcagagatgagtccgcgtcccattagcttgttggcggggtaacggcccaccaaggcgacgatgggtagccgatttaagaggatgatcggccacattggaactgaaacacggtccaaactcctacgggaggcagcagtggggaatattgcgcaatgggcgaaagcctgacgcagcgacgccgcgtgagggatgaaggtcttcggatcgtaaacctctgtcagaagggaaaaatgtacagtgctccaatcaacactgtattgatggtacctt

SEQ ID NO: 7337 - DNA, 490 bp, unidentified
  misc_feature 1..490: note = Ascusbbf_1647071, encodes 16S rRNA
  source 1..490: mol_type = genomic DNA
agagtttgatcatggctcaggacgaacgctggcggcgtgcttaacacatgcaagtcgaacggaggatttatttcggtagatccttagtggcgaacgggtgagtaacgcgtgggcaatctgcccttcagatggggacaacatcccgaaaggggtgctaataccgaatacgatccttccaccgcatggcggaaggatgaaagatggcctctatatataagctatcgctgaaggatgagcctgcgtctgattagcttgttggtggggtaacggcctaccaaggcgatgatcagtagccggtctgagaggatgaacggccacattgggactgagacacggcccaaactcctacgggaggcagcagtggggaatattccgcaatggacgaaagtctgacggagcaacgccgcgtgagtgatgaaggttttcggactgtaaagctctgttgtttgggacgaaagtgcctgttgcgaacagttacgggtattgacgg

SEQ ID NO: 7338 - DNA, 490 bp, unidentified
  misc_feature 1..490: note = Ascusbbf_4412, encodes 16S rRNA
  source 1..490: mol_type = genomic DNA
agagtttgatcatggctcaggatgaacgctggcggcgtgcttaacacatgcaagtcgaacggggcacccttgacagaggcttcggccaattgataggaatgcctagtggcggacgggtgagtaacgcgtgagtaacctgcctgggagtggggaataacacatcgaaaggtgtgctaataccgcataacacagtaggatcgcatggttttactgtcaaagatttatcgctttcagatggactcgcgtctgattagttagttggcggggtaacggcccaccaagacgacgatcagtagccggactgagaggttgaccggccacattgggactgagacacggcccagactcctacgggaggcagcagtggggaatattgggcaatgggcgcaagcctgacccagcaacgccgcgtgaaggaagaaggctttcgggttgtaaacttctttgacagaggacgaagaaagtgacggtactctgaaaacaagccacg

SEQ ID NO: 7339 - DNA, 490 bp, unidentified
  misc_feature 1..490: note = Ascusbbf_16287, encodes 16S rRNA
  source 1..490: mol_type = genomic DNA
agagtttgatcatggctcaggatgaacgctagcggcaggcttaacacatgcaagtcgaggggcagcgcgaggtagcaatactttggcggcgaccggcggaagggtgcgtaacgcgtgagcaacatgcccgtatgagggggatagtcattggaaacgatgcgtaataccccgtaacaacagaggcggcatcgcctttgtttgaaagatttatcgcatacggattggctcgcgtgacattagctagttggcggggtaacggcccaccaaggcgacgatgtctaggggaactgagaggttggtcccccacactggaactgagacacggtccagactcctacgggaggcagcagtgaggaatattggtcaatgggcggaagcctgaaccagccatgccgcgtgaaggactaaggccctatgggtcgtaaacttcttttgacggggagcaataagggcgtcgcgcacgtccgatgagagtactcgtcgaataagc

SEQ ID NO: 7340 - DNA, 490 bp, unidentified
  misc_feature 1..490: note = Ascusbbf_10682, encodes 16S rRNA
  source 1..490: mol_type = genomic DNA
agagtttgatcatggctcaggattaacgctggcggcatgcctaatacatgcaagtcgaatggaagagcttgcttttccatggcgaacgggtgagtaacacgtaggtaacctaccttaaggacgaggataacctttggaaacgaaggataatactggataggacatcataaaacacatgtttagatgtttaaaggagcaatccaccataagaggggcctgcggcgcattagctagttggtgagataaaggcccaccaaggcgatgatgcgtagccggactgagaggttgaacggccacaatgggactgagaacggcccatactcctacgggaggcagcagtagggaattttcggcaatggacaaaagtctgaccgagcaatgccgcgtgatcgaagaagtatttcggtatgtaaagatcttttatcagggaagaaaagacagattgactgaacctgatgaataagctccggctaactacgtgccagcagcc

SEQ ID NO: 7341 - DNA, 490 bp, unidentified
  misc_feature 1..490: note = Ascusbbf_33654, encodes 16S rRNA
  source 1..490: mol_type = genomic DNA
agagtttgatcatggctcaggataaacgctggcggcgtgcctaatacatgcaagtcgaacggacatagcttgctatgtcagtggcgaacgggtgagtaatacataagcaacctgcctacagggaccgggataacacttggaaacgagcgctaataccggataggcaagggaagggcatcctacccttgttaaagttgagagacacaagtagatgggcttatggcgcattagctggttggtagaggtaacggcctaccaaggcgatgatgcgtagccggcctgagagggtgaacggccacattgggactgagacacggcccagactcctacgggaggcagcagtagggaattttcggcaatggaggaaactctgaccgagcaacgccgcgtgagtgaagacggtcttcggattgtaaagctctgttgtaagggaagaaactatggattgataatccatactgacggtaccttaccagaaagccacggctaa

SEQ ID NO: 7342 - DNA, 490 bp, unidentified
  misc_feature 1..490: note = Ascusbbf_1562881, encodes 16S rRNA
  source 1..490: mol_type = genomic DNA
agagtttgatcctggctcaggatgaacgctggcggcgtgcttaacacatgcaagtcgaacggagactgcttacgaagctgaagtagcttgctatggaggtggagtgagtattcttagtggcggacgggtgagtaacgcgtgggtaacctacctcatacaggggaatagcagttggaaacgactgataaaaccgcataaaacggcagcagggcatcctgcaaccgtcaaatatttataggtatgagatgggcccgcgtctgattaggcagttggtgaggtaacggcccaccaaacctacgatcagtagccggcctgagagggtgaacggccacattgggactgagacacggcccaaactcctacgggaggcagcagtggggaatattggacaatgggggaaaccctgatccagcgacgccgcgtgagtgaagaagcatttcggtatgtaaagctctatcagcagggaagatgatgacggtacctgactaag

SEQ ID NO: 7343 - DNA, 490 bp, unidentified
  misc_feature 1..490: note = Ascusbbf_730503, encodes 16S rRNA
  source 1..490: mol_type = genomic DNA
agagtttgatcatggctcaggatgaacgctggcggcatgcctaagacatgcaagtcgtacgaggtggcccgttgagttctgtgcttgcacaaaacaattcggatccccacctagtggcgaaagggtgagtaacacgtgggttatctacctcagagactgggataactactggaaacggtagctaataccggatgatatatagaacgatacgttgttctatagtaaaaggagcctttaaagcttcactttgagatgagcctgcgacgtattagctagttggtaaggtaatggcttaccaaggcgacgatgcgtagccgacctgagagggtgatcggccacactgggactgagacacggcccagactcctacgggagacagcagttagggatattcgtcaatggaggaaactctgaacgagcaatgccgcgtgagtgatgacagttctttggattgtaaaactctgttgttagggaagaacgacctatatag

SEQ ID NO: 7344 - DNA, 490 bp, unidentified
  misc_feature 1..490: note = Ascusbbf_124860, encodes 16S rRNA
  source 1..490: mol_type = genomic DNA
agagtttgatcctggctcagattgaacgctggcggtatgcttaacacatgcaagtcgaacggcagcattttctagcttgctagagagatggcgagtggcggacgggtgagtaacgcgtaggaatatgccttaaagagggggacaacttggggaaactcaagctaataccgcataatttctttggaaaaaagctggggaccttcgggcctggcgctttaagattagcctgcgtacgattagctagttggtagggtaaaggcctaccaaggcgacgatcgttagctggtctgagaggatgaccagccacactggaactgagacacggtccagactcctacgggaggcagcagtggggaatattggacaatggggggaaccctgatccagcaataccgcgtgtgtgaagaaggcctgagggttgtaaagcactttcagtggggaggagggttgccaggttaagagccgggtgactggacgttacccacagaag

SEQ ID NO: 7345 - DNA, 490 bp, unidentified
  misc_feature 1..490: note = Ascusbbf_2321, encodes 16S rRNA
  source 1..490: mol_type = genomic DNA
agagtttgatcatggctcagaacgaacgctggcggcgcgtcttaagcatgcaagtcgagcggtaagttgtagcttgctacaacctagagcggcggactggtgagtaacgcgtgggtgacgtacccttttgacggggatagcctgtggaaacacagggtaataccggataagttcggatgtgtcagaggcattcgaagaaaggttcttttgaaccgcgaaaggagcggcccgcgtgctattagttagttggcggggtaacggcccaccaagacgacgatagctacccggcctaagagggtgaacgggcacattgggactgagatacggcccagactcctacgggaggcagcagctaagaatattccgcaatggacgaaagtctgacggagcgacgccgcgtggatgatgaaggccggaaggttgtaaaatccttttggaagcgaggaataagtggaatgagagaaacgttccatggtgacggtagcttctg

SEQ ID NO: 7346 - DNA, 490 bp, unidentified
  misc_feature 1..490: note = Ascusbbf_10450, encodes 16S rRNA
  source 1..490: mol_type = genomic DNA
agagtttgatcatggctcagattgaacgctggcggcatgccttacacatgcaagtcgaacggcagcgggggtgcttgcacctgccggcgagtggcgaacgggtgagtaatgcatcggaacgtacccagtcgtgggggataacgcagcgaaagctgtgctaataccgcatacgtcctgagggagaaagcaggggatcttcggaccttgtgcgattggagcggccgatgtcagattagctagttggtgaggtaaaagctcaccaaggcgacgatctgtagctggtctgagaggatgatcagccacactggaactgagacacggtccagactcctacgggaggcagcagtggggaattttggacaatgggggcaaccctgatccagccatgccgcgtgagtgaagaaggccttcgggttgtaaagctctttcggccgggaagaaatcgtgcaggctaataccctgtatggatgacggtaccggaataagaagc

SEQ ID NO: 7347 - DNA, 490 bp, unidentified
  misc_feature 1..490: note = Ascusbbf_16862, encodes 16S rRNA
  source 1..490: mol_type = genomic DNA
agagtttgatcatggctcaggatgaacgctagctacaggcttaacacatgcaagtcgaggggcatcatggtggtagcttgctaccgctgatggcgaccggcgcacgggtgagtaacacgtatccaacctgccttgagctcagggatagccctctgaaaggaggattaatacctgatgtggttgttggctgacatcagctttcaattaaagatttatcggctcatgatggggatgcgtctgattagcttgttggcggggtaacggcccaccaaggcgacgatcagtaggggttctgagaggaaggtcccccacataggaactgagacacggtcctaactcctacgggaggcagcagtgaggaatattggtcaatggtcgagagactgaaccagccaagtagcgtgaaggatgactgccctacgggttgtaaacttcttttatgcgggaataaagtgtggcacgtgtgccattttgtatgtaccgcatgaat

SEQ ID NO: 7348 - DNA, 490 bp, unidentified
  misc_feature 1..490: note = Ascusbbf_26051, encodes 16S rRNA
  source 1..490: mol_type = genomic DNA
agagtttgatcatggctcaggacgaacgctggcggcgtgcctaatacatgcaagtcgagcgagccgaactaacagatttgcttcggcaatgacgctaggaaagcgagcggcggatgggtgagtaacacgtgggtaacctgcccttaagcctgggataccacttggaaacaggtgctaataccggataacaactagagctgcatggttctagtttgaaaggcggcttcggctgtcacttaaggatggacccgcggtgcattagctagttggtaaggtagcggcttaccaaggcgacgatgcatagccgagttgagagactgatcggccacattgggactgagacacggcccaaactcctacgggaggcagcagtagggaatcttccacaatggacgcaagtctgatggagcaacgccgcgtgagtgaagaaggttttcggatcgtaaagctctgttattggtgaagaaggatagaggtagtaactggcctt

SEQ ID NO: 7349 - DNA, 490 bp, unidentified
  misc_feature 1..490: note = Ascusbbf_36784, encodes 16S rRNA
  source 1..490: mol_type = genomic DNA
agagtttgatcatggctcaggatgaacgctggcggcgtgcttaacacatgcaagtcgaacggaacatttcgcccgatgattgaagtagcttgctacggattgaatcaactgaaatgtttagtggcggacgggtgagtaacgcgtgggtaacctaccttacacagggggataacagttagaaatgactgctaataccgcataagcgcacagtaccgcatggtacggtgtgaaaaactccggtggtgtaagatggacccgcgtctgattagctagttggtgaggtaacggcccaccaaggcgacgatcagtagccggcctgagagggtgaacggccacattggaactgagacacggtccaaactcctacgggaggcagcagtggggaatattgcacaatgggggaaaccctgatgcagcgacgccgcgtgagtgatgaagtatttcggtatgtaaagctctatcagcagggaagatcatgacggtacctgac

SEQ ID NO: 7350 - DNA, 490 bp, unidentified
  misc_feature 1..490: note = Ascusbbf_23855, encodes 16S rRNA
  source 1..490: mol_type = genomic DNA
agagtttgatcctggctcaggacgaacgctggcggcacgcttaacacatgcaagtcgaacggagtttttgagagcttgcttttaaaaacttagtggcggacgggtgagtaacacgtgagcaatctgcctttcagagggggatagcagttggaaacgactgataataccgcataatatatacggaccgcatgatctgtatatcaaagatttatcgctgaaagatgagctcgcgtctgattagatagttggtgaggtaacggctcaccaagtcgacgatcagtagccggactgagaggttgaacggccacattgggactgagacacggcccagactcctacgggaggcagcagtggggaatattgcacaatgggcgcaagcctgatgcagcgatgccgcgtgagggaagaaggttttaggattgtaaacctctgtctttggggacgataatgacggtacccaaggaggaagctccggctaactacgtgccag

SEQ ID NO: 7351 - DNA, 490 bp, unidentified
  misc_feature 1..490: note = Ascusbbf_110291, encodes 16S rRNA
  source 1..490: mol_type = genomic DNA
agagtttgatcctggctcaggatgaacgctggcggcgtgcttaacacatgcaagtcgaacggaactgcttttgaagattctcttcggagatgattcagttgtagtttagtggcggacgggtgagtaacgcgtgagtaacctgcccttgagagggggataacgttctgaaaagaacgctaataccgcataaaactattgaaccgcatgattcgatagtcaaaactgaggtgctcaaggatggactcgcgtccgattagctagttggtaaggtaacggcttaccaaggcgacgatcggtagccggactgagaggttgaacggccacattgggactgagacacggcccagactcctacgggaggcagcagtgggggatattgcgcaatgggggaaaccctgacgcagcaacgccgcgtggatgatgacggttttcggattgtaaagtccttttcttagggacgaataatgacggtacctaaggaataagctcc

SEQ ID NO: 7352 - DNA, 490 bp, unidentified
  misc_feature 1..490: note = Ascusbbf_150381, encodes 16S rRNA
  source 1..490: mol_type = genomic DNA
agagtttgatcatggctcaggatgaacgctggcggcgtgcttaacacattcaagtcgaacggagtatttttgaaagcttgcttttgagaatacttagtggcggacgggtgagtaatgcatgagcaacctgcctttaagagggggataacacagagaaatctgtgctaataccgcatagaacactgagatggcatcatcatagtgggaaaggagcaatccgcttaaagatgggctcatgtctgattagatagttggcggggtaacggcccaccaaatccgcgatcagtagccggactgagaggttgaacggccacattggaactgagatacggtccagactcctacgggaggcagcagtggggaatattgggcaatgggcgaaagcctgacccagcgacgccgcgtgagggaagaaggtcttcggattgtaaacctctgttgataggaacgaaaaaatgacggtacctatcgaggaagccacggctaacta

SEQ ID NO: 7353 - DNA, 490 bp, unidentified
  misc_feature 1..490: note = Ascusbbf_1857348, encodes 16S rRNA
  source 1..490: mol_type = genomic DNA
agagtttgatcctggctcaggatgaacgctggcggcgtgcctaacacatgcaagtcgagcggacttatgataagattcttcggatgatttttataagttagcggcggatgggtgaggaacgcgtggagaacctacccttcacagggggataacagctggaaacggctgttaataccgcatatgctcacggtggcgcatgtcacagggaggaaagctccggcagtgaaggatggctccgcgtcggattaactagttggcggggtaacggcccaccaaggtgatgatccgtagccggcctgagagggcgaccggccacattgggactgagacacggcccaaactcctacgggaggcagcagtgggggatattgcacaatgggcgcaagcctgatgcagcgacgccgcgtgatggaggaagtacttcggtatgtaaacatctatcagcagggaagaagatgacgatacctgcagaagaagccccggctaacta

SEQ ID NO: 7354 - DNA, 490 bp, unidentified
  misc_feature 1..490: note = Ascusbbf_1524245, encodes 16S rRNA
  source 1..490: mol_type = genomic DNA
agagtttgatcctggctcaggacgaacgctggcggcgtgcctaacacatgcaagtcgagcggagacagaggaaggaaggcttcggccggaaagcttctgttttagcggcggacgggtgagtaacgcgtgagcaacctgtccttcacagggggataagataccgaaaggtgttctaataccgcataagaccacagagtcgcatgacagaggggtcaaaggagaaatccggtgaagggtgggctcgcgtccgattagatagttggtgaggtaacggcccaccaagtcaacgatcggtagccgacctgagaaggtgatcggccacattgggactgagacacggcccagactcctacgggaggcagcagtggggaatattgggcaatggggggaaccctgacccagcaacgccgcgtggaggaagaaggtcttcggatcgtaaactcctgtcctaagagacgagcaggagacggtaacttaggaggaagccccg

SEQ ID NO: 7355 - DNA, 490 bp, unidentified
  misc_feature 1..490: note = Ascusbbf_5641, encodes 16S rRNA
  source 1..490: mol_type = genomic DNA
agagtttgatcctggctcaggatgaacgctagctacaggcttaacacatgcaagtcgaggggcagcatggtcttagcttgctaaggctgatggcgaccggcgcacgggtgagtaacacgtatccaacctgccgtctactcttggccagccttctgaaaggaagattaatccaggatgggatcatgagttcacatgtccgcatgattaaaggtattttccggtagacgatggggatgcgttccattagatagtaggcggggtaacggcccacctagtcaacgatggataggggttctgagaggaaggtcccccacattggaactgagacacggtccaaactcctacgggaggcagcagtgaggaatattggtcaatgggcgatggcctgaaccagccaagtagcgtgaaggatgactgccctatgggttgtaaacttcttttataaaggaataaagtcgggtatgcatacccgtttgcatgtactttatga

SEQ ID NO: 7356 - DNA, 490 bp, unidentified
  misc_feature 1..490: note = Ascusbbf_18801, encodes 16S rRNA
  source 1..490: mol_type = genomic DNA
agagtttgatcatggctcaggacgaacgctggcggcgtgcctaacacatgcaagtcgaacggagtgcttaaagcttgctttgaacacttagtggcggacgggtgagtaacgcgtggggaacctgcctttcagagggggataacgttctgaaaagaacgctaataccgcataacgtatgaccgtcgcatggcggacataccaaaggagcaatccgctgaaagatggccccgcgtccgattagatagttggcgaggtaacggctcaccaagtcgacgatcggtagccggactgagaggttgaacggccacattgggactgagacacggcccagactcctacgggaggcagcagtgggggatattgcacaatgggggaaaccctgatgcagcaacgccgcgtgagggaagaaggttttcggattgtaaacctctgtccttggtgaagataatgacggtagccgaggaggaagctccggctaactacgtgccag

SEQ ID NO: 7357 - DNA, 490 bp, unidentified
  misc_feature 1..490: note = Ascusbbf_72651, encodes 16S rRNA
  source 1..490: mol_type = genomic DNA
agagtttgatcatggctcaggatgaacgctggcggcgtgcttaacacatgcaagtcgaacggagactgttgatgaagcggaagggcttgcccggaagtggaattgatagtcttagtggcggacgggtgagtaacgcgtgggtaacctacctcatacaggggaatagcagttggaaacgactgataaaaccgcataaaacggcagcagggcatcctgcaaccgtcaaatatttataggtatgagatgggcccgcgtctgattaggcagttggtgaggtaacggcccaccaaacctacgatcagtagccggcctgagagggtgaacggccacattgggactgagacacggcccaaactcctacgggaggcagcagtggggaatattggacaatggggggaaccctgatccagcgacgccgcgtgagtgaagaagtatttcggtatgtaaagctctatcagcagggaagatgatgacggtacctgactaagaa

SEQ ID NO: 7358 - DNA, 490 bp, unidentified
  misc_feature 1..490: note = Ascusbbf_90424, encodes 16S rRNA
  source 1..490: mol_type = genomic DNA
agagtttgatcatggctcagattgaacgctggcggcatgctttacacatgcaagtcggacggcagcacgagtacttgtacttggtggcgagtggcgaacgggtgagtaatgcattggaacgtaccgagtagtgggggataactagtcgaaagattagctaataccgcatacgtcttgagagagaaagcaggggatcttcggaccttgcgctatttgagcggccaatgtctgattagctagttggtggggtaagggcctaccaaggcgacgatcagtagtgggtctgagaggatgatccgccacactgggactgagacacggcccagactcctacgggaggcagcagtggggaattttggacaatgggggcaaccctgatccagccatgccgcgtgtctgaagaaggccttcgggttgtaaaggacttttgtcagggaagaaaaggcgattgctaatatcagttgctgatgacggtacctgaagaataagc

SEQ ID NO: 7359 - DNA, 490 bp, unidentified
  misc_feature 1..490: note = Ascusbbf_166164, encodes 16S rRNA
  source 1..490: mol_type = genomic DNA
agagtttgatcctggctcaggatgaacgctggcggcaggcctaatacatgcaagtcgcacgggatcgctccttcgggggcgtgagagtggcggacgggtgcgcaacgcgtatgcaaccagccccctgcaggcggatagccggtggaaacgccggataatacgccatgtttcgggtagagggcatcctttacctgagaaagcggagacgcggcgggggacgggcatgcgtcccattagctagttggcggggtgagggcccaccaaggctgtgatgggtaggggatctgagaggacggtcccccacactggcactgagacacgggccagactcctgcgggaggcagcagtaggggatattgggcaatgggcggaagcctgacccagccatgccgcgtgaggggatgaggccctacgggtcgtgaacctcttttatgcggggacaacgccccccacgagatgggggtttgagggtaccgcaggaataagcgcc

SEQ ID NO: 7360 - DNA, 490 bp, unidentified
  misc_feature 1..490: note = Ascusbbf_855758, encodes 16S rRNA
  source 1..490: mol_type = genomic DNA
agagtttgatcatggctcaggacgaacgctggcggcatgcctaacacatgcaagtcgaacggagccaacctgatgatcccttcggggtgaattaggggaagcttagtggcggacgggtgagtaacgcgtgagtaacctgcctctgagaggggaataacgttccgaaaggaacgctaataccgcataatgtgattttatcgcatggtagagtcaccaaagatttatcgctcagagatggactcgcgtctgatttgctggttggtgaggtaacggcccaccaaggcgacgatcagtagccgagctgagaggctgatcggccacattgggactgagacacggcccagactcctacgggaggcagcagtgggggatattgcgcaatgggggaaaccctgacgcagcaatgccgcgtgaaggaagaaggtcttcggatcgtaaacttttgtctttggggacgataatgacggtacccgaggaggaagccacggct

SEQ ID NO: 7361 - DNA, 490 bp, unidentified
  misc_feature 1..490: note = Ascusbbf_316628, encodes 16S rRNA
  source 1..490: mol_type = genomic DNA
agagtttgatcctggctcaggatgaacgctagctacaggcttaacacatgcaagtcgcggggcagcatgtatccgggcaaccgggtatgatggcgaccggcgcacgggtgcgtaacgcgtatccaacctgcccgcaagacggggacagcccggcgaaagtcggattaatccccgatgtggtgtgacgagggcatctgagtgacaccaaagggagcgatccgcttgcggatggggatgcgtacgattaggtagacggcggggtgatggcccaccgtgccgacgatcgttaggggttctgagaggaaggtcccccacactggtactgagacacggaccagactcctacgggaggcagcagtgaggaatattggtcaatgggcggatgcctgaaccagccaagtagcgtgcaggacgacggccctacgggttgtaaactgcttttatgcggggataacagggtgcacgtgtgcgcctttgcaggtaccgcatg

SEQ ID NO: 7362 - DNA, 490 bp, unidentified
  misc_feature 1..490: note = Ascusbbf_752378, encodes 16S rRNA
  source 1..490: mol_type = genomic DNA
agagtttgatcctggctcaggacgaacgctggcggcgtgcctaatacatgcaagtcgaacgcacagacaacggaacttgttccgttagacgtgagtggcgcacgggtgagtaacacgtgggaaacctacccttcagcgggggataaccgtcggaaacgatggctaataccgcataggtctttgaaccacctggtttaaagaggaaagacggctttggctgtcactgaaggatggtcctgcggtgcattagctagttggtaaggtaacggcttaccaaggcgatgatgcatagccgacctgagagggtgatcggccacattgggactgagacacggcccaaactcctacgggaggcagcagtagggaatctgccgcaatggacgcaagtctgacggagcaacgccgcgtgtgtgaagaaggtcttcggatcgtaaagtactgttattagagaagaacaaccggtagagtaactgttactggcttgacggta

SEQ ID NO: 7363 - DNA, 490 bp, unidentified
  misc_feature 1..490: note = Ascusbbf_105076, encodes 16S rRNA
  source 1..490: mol_type = genomic DNA
agagtttgatcatggctcagattgaacgctggcggcaggcctaacacatgcaagtcggacggtagcacagagagcttgctcttgggtgacgagtggcggacgggtgagtaatgtctggggatctgcccgatagagggggataaccactggaaacggtggctaataccgcataacgtcgcaagaccaaagagggggaccttcgggcctctcactatcggatgaacccagatgggattagctagtaggcggggtaatggcccacctaggcgacgatccctagctggtctgagaggatgaccagccacactggaactgagacacggtccagactcctacgggaggcagcagtggggaatattgcacaatgggcgcaagcctgatgcagccatgccgcgtgtatgaagaaggccttcgggttgtaaagtactttcagcggggaggaaggcgatgtggttaataaccgcatcgattgacgttacccgcagaagaa

SEQ ID NO: 7364 - DNA, 490 bp, unidentified
  misc_feature 1..490: note = Ascusbbf_143232, encodes 16S rRNA
  source 1..490: mol_type = genomic DNA
agagtttgatcatggctcaggatgaacgctggcggcgtgcctaacacatgcaagtcgaacggagatatgtggaatgcggacttgtccaaatgaaacatatgcttagtggcggacgggtgagtaacgcgtggataacctgcctttttctgggggatagcagttggaaacgactggtaataccgcatgagcttgtccctgggcatccaggggtgaggaaagatttatcgggaaaagatggatccgcgtctgattagccagttggcggggtaacggcccaccaaagcgacgatcagtagccggcctgagagggtgaacggccacattgggactgagacacggcccagactcctacgggaggcagcagtgggggatattgcacaatggggggaaccctgatgcagcgacgccgcgtgagtgaagaagtatttcggtatgtaaagctctatcagcagggaagaaagacccttcggggggatgacggtacctgact

SEQ ID NO: 7365 - DNA, 490 bp, unidentified
  misc_feature 1..490: note = Ascusbbf_1716470, encodes 16S rRNA
  source 1..490: mol_type = genomic DNA
agagtttgatcatggctcaggatgaacgctggcggcgtgcttaacacatgcaagtcgaacgaagcactttttgaatcttcggaggaaagaagtgactgagtggcggacgggtgagtaacgcgtggggaacctgccttataccgggggatagcagttggaaacgactggtaaaaccgcataagcgcacgggtacgcatgtacctgtgtgaaaaactctggtggtataagatggacccgcgtctgattaggcagttggcggagtaacggcccaccaaaccgacgatcagtagccgacctgagagggtgaccggccaaattgggactgagacacggcccagactcctacgggaggcagcagtggggaatattgcacaatggaggaaactctgatgcagcgacgccgcgtgagtgaagaagtatttcggtatgtaaagctctttcggcagggaagataatgacggtacctgcagaagaagcaccggctaaatac

SEQ ID NO: 7366 - DNA, 490 bp, unidentified
  misc_feature 1..490: note = Ascusbbf_138166, encodes 16S rRNA
  source 1..490: mol_type = genomic DNA
agagtttgatcatggctcaggatgaacgctggcggcgtgcttaacacatgcaagtcgaacgattaaaccggcttcggccggatatagagtggcgaacgggtgagtaacacgtgatcaacctacctcgtacttcgggatagcctcgtgaaaacgggattaataccggatactccgattgaaccgcatgattctttcgggaaagcctttacggtacgagatgggatcgcggcccattagatagttggtggggtaacggcctaccaagtcgatgatgggtagccgggttgagagaccgaccggccacattgggactgagatacggcccagactcctacgggaggcagcagtggggaatattgcgcaatgggggaaaccctgacgcagcaacgccgcgtgcgggatgaaggccttcgggttgtaaaccgctttcagtagggacgaataaatgacggtacctacacaagaagccccggctaattacgtgccagca

SEQ ID NO: 7367 - DNA, 472 bp, unidentified
  misc_feature 1..472: note = Ascusbbf_155287, encodes 16S rRNA
  source 1..472: mol_type = genomic DNA
agagtttgatcatggctcagaacgaacgctggcggcaggcctaacacatgcaagtcgaacgctcgtagcaatacgggagtggcagacgggtgagtaacgcgtgggaacataccctttggttcggaataactcatggaaacgtgagctaataccggatacggcagagatgcgaaagatttatcgccgaaggattggcccgcgttcgattagctagttggtgaggtaatggctcaccaaggcgacgatcgatagctggtctgagaggatgaccagccacactgggactgagacacggcccagactcctacgggaggcagcagtggggaatattggacaatgggcgcaagcctgatccagccatgccgcgtgagtgatgacggccttagggttgtaaagctctttcgccagggacgataatgacggtacctggataagaagccccggctaacttcgtgccagcagccgcggtaat

SEQ ID NO: 7368 - DNA, 490 bp, unidentified
  misc_feature 1..490: note = Ascusbbf_1622711, encodes 16S rRNA
  source 1..490: mol_type = genomic DNA
agagtttgatcatggttcagaacgaacgctggcggcgcgtcttaagcatgcaagtcggacggcatgaggaatgcttgcattcctcagagagtggcggactggtgagtaacacgtgggtgacctacccttgagatggggatagccgttagaaatagcggataataccgaatacgctctacgaactgtggtttgtagaggaaatcaggctacggcctggctcaaggatgggcccgcgtcccattagctagttggtgaggtaacggcccaccaaggcgacgatgggtatccggcctgagagggtgtacggaaacattgggactgagatacggcccaaactcctacgggaggcagcagctaagaatattccgcaatggacgaaagtctgacggagcgacgccgcgtggatgaagaaggccgaaaggttgtaaagtccttttgctgatgaagaataagcgtggtagggaatgaccgcgtgatgacattagtcggt

SEQ ID NO: 7369 - DNA, 490 bp, unidentified
  misc_feature 1..490: note = Ascusbbf_303410, encodes 16S rRNA
  source 1..490: mol_type = genomic DNA
agagtttgatcctggctcaggatgaacgctggcggcgtgcctaatacatgcaagtcgagcggcagcatgcttctcaccgaggttcgaagtaatatctgataaatgatatctgatattcacttggagctttagtgagaagtgatggcgagcggcggacgggtgagtaacacgtgggaatctaccccaaactgagggataagcatcggaaacggtgtctaataccgcatatggtcttcggattaaagcttcggcggtttgggaagagcccgcgcaagattagctagttggtaaggtaatggcttaccaaggcgacgatctttagctggtttgagaggatgatcagccacactggaactgagacacggtccagactcctacgggaggcagcagtaaggaattttccacaatgggggcaaccctgatggagcaacgccgcgtgcaggatgaatgccttcgggttgtaaactgcttttatatgcgaagaatatga

SEQ ID NO: 7370 - DNA, 490 bp, unidentified
  misc_feature 1..490: note = Ascusbbf_41581, encodes 16S rRNA
  source 1..490: mol_type = genomic DNA
agagtttgatcatggctcaggatgaacgctggcggcgtgcctaatacatgcaagtcgaacgagggtgcttgcaccctagtggcgaacgggtgagtaacacgtaggtaacctgcccttaagcttgggatacccagaggaaactttggctaataccggataacaacagatgaggcatctcaactgcttgaaaggccctttacggggtcacttaaggatggacctgcggcgcattagctagttggtgagataacagcccaccaaggcgaggatgcgtagccgaactgagaggttgatcggccacattggaactgagacacggtccaaactcctacgggaggcagcagtaaggagttttcggcaatgggggaaaccctgaccgagcaacgccgcgtgagtgatgacggccctatgggttgtaaagctcttttattagagacgaatggtgagattaggaaatgaatctcacttgactgtatcttttgaataagcc

SEQ ID NO: 7371 - DNA, 490 bp, unidentified
  misc_feature 1..490: note = Ascusbbf_17829, encodes 16S rRNA
  source 1..490: mol_type = genomic DNA
agagtttgatcctggctcaggacgaacgctggcggcgtgcctaacacatgcaagtcgaacggactgattctcttcggagatgaaagtcagtggcggacgggtgagtaacgcgtgagtaacctgccttacagagggggataacgtttggaaacgaacgctaataccgcataacgtgcagatgtcgcctggcatcagtaccaaaggagcaatccgctgtaagatggactcgcgtccgattagatagttggcggggtaacggcccaccaagtcgacgatcggtagccggactgagaggttgaacggccacattgggactgagacacggcccagactcctacgggaggcagcagtgagggatattgcacaatgggcgaaagcctgatgcagcaacgccgcgtgagggaagacggttttcggattgtaaacctctgttctcagtgaagataatgacattagctgaggagaaagccacggctaactacgtgccagc

SEQ ID NO: 7372 - DNA, 490 bp, unidentified
  misc_feature 1..490: note = Ascusbbf_205626, encodes 16S rRNA
  source 1..490: mol_type = genomic DNA
agagtttgatcctggctcaggacgaacgctggcggcgtgcctaacacatgcaagtcgagcggagacacgggacttcggttctgtgtttcagcggcggacgggtgagtaacgcgtgagcaatctgtcccagtcaccgggataacaactggaaacagttgctaataccgggcgagaccacagcaccgcatggtgcaggggtaaaagggataccggattggggtgagctcgcgtcccattaggtagttggtgaggtaacggcccaccaagccgacgatgggtagccgacctgagagggtgatcggccacactggaactgagacacggtccagactcctacgggaggcagcagtgggaatattgggcaatgggcgaaagcctgacccagcaacgccgcgtgagggaagaaggttttcggattgtaaacctctgtccttggtgacgaaggaagtgacggtagccaaggaggaagccccggctaactacgtgccag

SEQ ID NO: 7373 - DNA, 490 bp, unidentified
  misc_feature 1..490: note = Ascusbbf_132485, encodes 16S rRNA
  source 1..490: mol_type = genomic DNA
agagtttgatcatggctcaggatgaacgctagcgggaggcctaacacatgcaagccgagcggtatttatagcttgctatagagagagcggcgcacgggtgcgtaacgcgtatggaacttgccctttagaatgggatagcccggagaaattcggattaataccgtataatatatgataaggcatcttattgtattgaaagatttattgctaaaggatagtcatgcgttagattagttagttggtaaggtaacggcttaccaagacgatgatctataggggtcctgagagggagatcccccacactggtactgagacacggaccagactcctacgggaggcagcagtgaggaatattggacaatgggtggaagcctgatccagccatcccgcgtgtaggaagactgccttatgggttgtaaactacttttatctggggataaacctactctcgtgagagtagctgaaggtaccagaagaataagcaccggct

SEQ ID NO: 7374 - DNA, 490 bp, unidentified
  misc_feature 1..490: note = Ascusbbf_150430, encodes 16S rRNA
  source 1..490: mol_type = genomic DNA
agagtttgatcctggctcagaacgaacgctggcggcgcgcctaacacatgcaagtcggacgcactcgggtcttcgggcccggatgagtggcggacgggtgagtaacacgtgggaacctgccctggggtctgggatagctgcgggaaactgcaggtaacaccggatgcgccctttcccgagagggggaggggaaagtttacgccctgggatgggcccgcgtcggattaggtagttggtgaggtagtggctcaccaagcctgcgatccgtagccggtctgagaggatgatcggccacactgggactgagacacggcccagactcctacgggaggcagcagtggggaatcttggacaatgggggcaaccctgatccagcgacgccgcgtgggtgatgaaggccttcgggtcgtaaagcccttttgccggggaagatgatgacggtacccggagaagaagcaccggctaactctgtgccagcagccgcggtaat

SEQ ID NO: 7375 - DNA, 490 bp, unidentified
  misc_feature 1..490: note = Ascusbbf_192087, encodes 16S rRNA
  source 1..490: mol_type = genomic DNA
agagtttgatcctggctcaggatgaacgctggcggcgtgcttaatacatgcaagtcgaacggacgccttgagtagcttgctacaagaggtagtgcgtggcgaacgggtgagtaatacataggcaatctaccccggtgagcgggataaccaagggaaactctggataataccgcataggtaatcggaaggcatcttctgattattaaagtcgcgtttgcgacactccgggatgagcttatggcgcattagttagttggtgaggtaacggcccaccaagaccgtgatgcgtagccggcctgagagggtgaacggccacattgggactgagacacggcccagactcctacgggaggcagcagtaaggaattttcggcaatggacgaaagtctgaccgagcaacgccgcgtgagtgatgaaggtcttcggatcgtaaagctctgttgtaaaggaagaactgatatcggaggaaatgccggtatcttgacggtac

SEQ ID NO: 7376 - DNA, 490 bp, unidentified
  misc_feature 1..490: note = Ascusbbf_5948, encodes 16S rRNA
  source 1..490: mol_type = genomic DNA
agagtttgatcatggctcaggatgaacgctggcggcgtgcttaacacatgcaagtcgaacgaatttcttaccgatcgcgacttcggtcaagagaggtttgaagtgagtggcggacgggtgagtaacgcgtgggtaacctgccttacaccgggggataacagagggaaacttctgctaataccgcataagaccacggtaccgcatggtacagaggtaaaagttccggcgatgtaagatggacccgcgtctgattagccagttggcggggtaacggcccaccaaagcgacgatcagtagccgacctgagagggtgatcggccacattgggactgagacacggcccaaactcctacgggaggcagcagtggggaatattgggcaatgggcgcaagcctgacccagcgacgccgcgtgagtgaagaagtatttcggtatgtaaagctctttaagcagggaagataatgacggtacctgcagaataagcaccggc

SEQ ID NO: 7377 - DNA, 490 bp, unidentified
  misc_feature 1..490: note = Ascusbbf_18488, encodes 16S rRNA
  source 1..490: mol_type = genomic DNA
agagtttgatcatggctcaggatgaacgctagcggcaggcctaacacatgcaagtcgaggggcagcgcggggtagcaataccctggcggcgaccggcggatgggtgcgtaacgcgtatgcaacctgcctccgagagggggataacccgtggaaacgcggactaataccccgtatgcgcacgccgtcgcatggcggagtgcggaaagattgatcgctcggagatgggcatgcgtggcattaggtagttggcggggcaacggcccaccaagccatcgatgcctaggggagctgagaggctaatcccccacactggtactgagacacggaccagactcctacgggaggcagcagtgaggaatattggtcaatggagggaactctgaaccagccatgccgcgtgagggaagacggccctacgggttgtaaacctcttttagccgggagcaataaggcgcgtgcgcgcgtcgacgagagtaccggcggaataagc

SEQ ID NO: 7378 - DNA, 490 bp, unidentified
  misc_feature 1..490: note = Ascusbbf_35492, encodes 16S rRNA
  source 1..490: mol_type = genomic DNA
agagtttgatcatggctcaggatgaacgctggcggcgtgcttaacacatgcaagtcgaacgaggaattaccgatgaagttttcggatggatttggtttttccgagtggcggacgggtgagtaacgcgtgggtaacctgccttacactgggggacaacagagagaaatttctgctaataccgcataacccgctaggggcgcatgccccggacggaaaagatttatcggtgtaagatggacccgcgtctgattagcttgttggcggggtaacggcccaccaaggcgacgatcagtagccgaactgagaggttgaccggccacattgggactgagacacggcccagactcctacgggaggcagcagtggggaatattgcacaatgggggaaaccctgatgcagcaacgccgcgtgagtgatgaagtatttcggtatgtaaagctctatcagcagggaagataatgacggtacctgactaagaagccccggcta

SEQ ID NO: 7379 - DNA, 490 bp, unidentified
  misc_feature 1..490: note = Ascusbbf_148924, encodes 16S rRNA
  source 1..490: mol_type = genomic DNA
agagtttgatcatggctcaggatgaacgctggcggcgtgcctaacacatgcaagtcgaacggagatacgcggaatgcggattcgtccaaatgaaacgtatacttagtggcggacgggtgagtaacgcgtggataacctgcctttttccgggggatagcagttggaaacgactggtaataccgcataagcttcctttgaggcatctcagagggaggaaagatttatcgggagaagatggatccgcgtctgattagccagttggcggggtaacggcccaccaaagcaacgatcagtagccggcctgagagggtgaacggccacattgggactgagacacggcccagactcctacgggaggcagcagtgggggatattgcacaatggggggaaccctgatgcagcgacgccgcgtgagtgaagaagtatttcggtatgtaaagctctatcagcagggaagaaaggcccattatgggagatgacggtacctgac

SEQ ID NO: 7380 - DNA, 490 bp, unidentified
  misc_feature 1..490: note = Ascusbbf_111838, encodes 16S rRNA
  source 1..490: mol_type = genomic DNA
agagtttgatcatggctcaggatgaacgctagctacaggcttaacacatgcaagtcgaggggcatcatggggtttgcttgcaagccctgatggcgaccggcgcacgggtgagtaacgcgtatccaacctgcccccgagtagggaacagcccggcgaaagtcggattaatgccctatgtatcccatgacggcatcagaatgggatgaaagatttatcgcttggggatggggatgcgtaggattagcttgcaggcggggtaacggcccacctgggcatcgatccttaggggttctgagaggaaggtcccccacactggtactgagacacggaccagactcctacgggaggcagcagtgaggaatattggtcaatgggcgtgagcctgaaccagccaagtagcgtgcaggatgacggccctacgggttgtaaactgcttttatgcgtggataaagtggcctacgtgtaggctattgcaggtatcgcatgaata

SEQ ID NO: 7381 - DNA, 490 bp, unidentified
  misc_feature 1..490: note = Ascusbbf_136732, encodes 16S rRNA
  source 1..490: mol_type = genomic DNA
agagtttgatcctggctcaggatgaacgctggcggcgtgcataacacattcaagtcgaacgaagcattaagacggaagccttcgggtggaagatttaatgacttagtggcggacgggtgagtaacgcgtgagcaaccttcctgcctgtgagggataacacagggaaacttgtgctaataccgcataaagcatttgagtcgcatggtttaggtgccaaagatttattgcaggcagatgggctcgcgtctgattagatagtaggtgaggtaacggcccacctagtcgacgatcagtagccggactgagaggttgaacggccacattggaactgagagacggtccagactcctacgggaggcagcagtggggaatattgggcaatgggcgaaagcctgacccagcgacgccgcgtgagggaagaaggtcttcggattgtaaacctctttcagcaaggaagaagaaagtgacggtacttgcagaagaagccacg

SEQ ID NO: 7382 - DNA, 490 bp, unidentified
  misc_feature 1..490: note = Ascusbbf_344779, encodes 16S rRNA
  source 1..490: mol_type = genomic DNA
agagtttgatcatggctcaggatgaacgctggcggcatgcctaagacatgcaagtcgaacggagtgacccattgaagttggagtgcttgcacaaagacggatttggattttcactcagtggcagacgggtgagtaacgcgtgggtaatctacctcgaagactgggataacttctggaaacggatgctaataccggataattcatatttagataactagatatgctaaaaggggcttcggcctcacttcgagatgagcttgcgttgtattagctagttggtggggtaatggcctaccaaggcaacgatgcatatccgagctgagaggctgatcggacacattgggactgagacacggcccagactcctacgggagacagcagttaggaatattcgtcaatgggggaaaccctgaacgagcaatgccgcgtgaatgatgacaatcctctggattgtaaaattctgttgtaaaggaagaaaccttatcatagg

SEQ ID NO: 7383 - DNA, 490 bp, unidentified
  misc_feature 1..490: note = Ascusbbf_331010, encodes 16S rRNA
  source 1..490: mol_type = genomic DNA
agagtttgatcatggctcagattgaacgctggcggcatgccttacacatgcaagtcgaacggcagcacgggggcaaccctggtggcgagtggcgaacgggtgagtaatgcatcggaacgtgcccggtagtgggggatagcccggcgaaagccggattaataccgcatacgtactgaggtagaaagcggggaccttcgggcctcgcgctatcggagcggccgatgtcggattagctagttggtggggtaaaggcctaccaaggcgacgatccgtacctggtctgagaggacgaccaggcacactgggactgagacacggcccagactcctacgggaggcagcagtggggaattttggacaatgggcgcaagcctgatccagcaatgccgcgtgtgtgaagaaggccttcgggttgtaaagcacttttgtccggaaagaaatctcctgggttaatacctcggggggatgacggtaccggaagaataagcacc

SEQ ID NO: 7384 - DNA, 490 bp, unidentified
  misc_feature 1..490: note = Ascusbbf_203157, encodes 16S rRNA
  source 1..490: mol_type = genomic DNA
agagtttgatcatggctcaggatgaacgctggcggcgtgcctaacacatgcaagtcgaacgaagcatcgcgcccgaggaaatggagtgcttgcacgagatggaatcaattgtgatgacttagtggcggacgggtgagtaacgcgtgggtaacctaccctatacagggggataacagttagaaatgactgctaataccgcataagcgcacactgttgcatgacagagtgtgaaaagccgagacggtataggatggacccgcgtctgattagccagttggcagggtaacggcctaccaaagcaacgatcagtagccggcctgagagggtgaacggccacattgggactgagacacggcccaaactcctacgggaggcagcagtgggggatattgcacaatgggggaaaccctgatgcagcgacgccgcgtgagtgaagaagtatttcggtatgtaaagctctatcagcagggaagaaaatgacggtacctga

SEQ ID NO: 7385 - DNA, 490 bp, unidentified
  misc_feature 1..490: note = Ascusbbf_292642, encodes 16S rRNA
  source 1..490: mol_type = genomic DNA
agagtttgatcctggctcaggatgaacgctagcggcaggcctaacacatgcaagtcgaggggtataaatagcttgctattttgagaccggcggatgggtgcgtaacgcgtatgcaatctaccttatacattgggatagcccggagaaattcggattaataccttatagtatattaaagtggcatcattttaatattaaagatttatcggtataagatgagcatgcgtcccattagttagttggtgtggtaacggcataccaagactatgatgggtcggggtcctgagagggagatcccccacactggtactgagacacggaccagactcctacgggaggcagcagtgaggaatattggtcaatggacggaagtctgaaccagccatgccgcgtgcaggaagaatgtcctatggattgtaaactgcttttatacgggaagaaacgcatcgacgtgtcgatgtttgacggtaccgtaagaataaggatcggc

SEQ ID NO: 7386 - DNA, 490 bp, unidentified
  misc_feature 1..490: note = Ascusbbf_918786, encodes 16S rRNA
  source 1..490: mol_type = genomic DNA
agagtttgatcatggctcaggatgaacgctggcggcgtgcttaatacatgcaagtcgaacgctgaagcaactagcttgctagatgtggatgagtggcgaacgggtgagtaatacataggcaacctaccctagagtgggggatagcagttggaaacgactattaataccccataggtaatttgaaggcatcttcgaattattaaagatgcgtttgcatcgctgtaggatgggcttatggtgcattagtttgttggtgaggtaacggctcaccaagactatgatgcatagccggcctgagagggtgaacggccacattgggactgagacacggcccagactcctacgggaggcagcagtaaggaattttcggcaatgggcgaaagcctgaccgagcaacgccgcgtgaatgatgaaggtcttcggatcgtaaaattctgttgtaaaggaagaactgatacatgaggaaatgcttgtatcttgacggtacttt

SEQ ID NO: 7387 - DNA, 490 bp, unidentified
  misc_feature 1..490: note = Ascusbbf_23388, encodes 16S rRNA
  source 1..490: mol_type = genomic DNA
agagtttgatcatggctcagaacgaacgctggcggcgcgtcttaagcatgcaagtcgaacggcaagattggtgcttgcaccgatcctagagtggcggactggtgagtaacgcgtgggtgatttaccctgaagatggggatagccgatagaaatatcggataataccgaatacgcttggtgaggttagagtgcatcaaggaaaggagcttcggctccgcttcaggaaaggcccgcgtactattagctagttggtgaggtaacggcccaccaaggcaacgatagttatccggcctaagagggtgaacggacacattgggactgagatacggcccagactcctacgggaggcagcagctaagaatattccgcaatggacgaaagtctgacggagcgacgccgcgtggatgatgaaggccggaaggttgtaaaatccttttaagcacgaagaataagcaggagaggtaatgcttctgtggtgactgtactgcta

SEQ ID NO: 7388 - DNA, 490 bp, unidentified
  misc_feature 1..490: note = Ascusbbf_92233, encodes 16S rRNA
  source 1..490: mol_type = genomic DNA
agagtttgatcctggctcaggacgaacgctggcggcgcgcctaacacatgcaagtcgaacgaagagtgtgtttttgattccttcgggatgataagcgcatttcttagtggcggacgggtgagtaacacgtgagcaacctgccttgcagtgggggataacggttggaaacgatcgctaatacctcataatatatgattgtcgcatggctttcatatcaaagttttttcgctgcaagatgggctcgcgtctgattagattgttggtggggtaatggctcaccaagtcgacgatcagtagccggactgagaggttgatcggccacattgggactgagacacggcccagactcctacgggaggcagcagtgggggatattgcacaatgggggaaaccctgatgcagcgacgccgcgtgagggaagaaggtcttcggattgtaaacctctgtctttggggacgataatgacggtacccaaggaggaagctccggc

SEQ ID NO: 7389 - DNA, 490 bp, unidentified
  misc_feature 1..490: note = Ascusbbf_67945, encodes 16S rRNA
  source 1..490: mol_type = genomic DNA
agagtttgatcatggctcagaacgaacgctggcggcgcgttttaagcatgcaagtcgagcggtagtagcaatacgagagcggcggacgggtgagtaacacgtgggtaatctgcctttcagtcggggatagcctgtggaaacacaggataataccggatgcgatgccatgtacacatgtacgaggcaggaaaggggccaaggccccgctggaagatgagcccgcggcccattagctagatggtgaggtaaaggcccaccatggcgatgatgggtagccggcctgagagggtgaacggtcacattggaactgagacacggtccagactcctacgggaggcagcagctaagaatcttccacaatggacgaaagtctgatggagcgacgccgcgtggacgatgaaggccgtgaggttgtaaagtccttttctgaagggagaataacggggacagggaatggtcctcagatgacgtgaattcaggaataagcccc

SEQ ID NO: 7390 - DNA, 483 bp, unidentified
  misc_feature 1..483: note = Ascusbbf_39678, encodes 16S rRNA
  source 1..483: mol_type = genomic DNA
agagtttgatcctggctcaggattaacgctggcggcatgcctaatacatgcaagtcgaatgggaagcttgctttccatggcgaacgggtgagtaacacgtaggtaacctgccttacactcgaggataaccgttggaaacgacggataatactggataggacatgaggtcgcatgaccacatgtttaaaagcaatggtgtatgaggggcctgcggtgcattagctagttggtgaggtaagggctcaccaaggcgatgatgcatagctggactgagaggttgaacagccacaatgggactgagaacggcccatactcctacgggaggcagcagtagggaattttcggcaatgggggaaaccctgaccgagcaatgccgcgtgaacgaagaagtatttcggtatgtaaagttcttttattaggaaagatagtgacggtacctaatgaataagctccggctaactacgtgccagcagccgcggtaat

SEQ ID NO: 7391 - DNA, 490 bp, unidentified
  misc_feature 1..490: note = Ascusbbf_98113, encodes 16S rRNA
  source 1..490: mol_type = genomic DNA
agagtttgatcctggctcaggatgaacgctggcggcgtgcttaacacatgcaagtcgaacgaagttgctttaaggaaggtttcggctggaattaaagtagcttagtggcggacgggtgagtaacgtgtgggcaacctaccttgtactggggaataatcactggaaacggtgactaataccgcatacggtcttcggaaggcatcttctgaagaagaaaggatttattcggtataagatgggcccgcatctgattagctagttggtgagataacagcccaccaaggcgacgatcagtagccgacctgagagggtgatcggccacattgggactgagacacggcccaaactcctacgggaggcagcagtggggaatattgcacaatgggggaaaccctgatgcagcaacgccgcgtgaaggaagaaggttttcggatcgtaaacttctatcaatagggacgaaaaaaatgacggtacctaaataagaagcccc

SEQ ID NO: 7392 - DNA, 490 bp, unidentified
  misc_feature 1..490: note = Ascusbbf_609346, encodes 16S rRNA
  source 1..490: mol_type = genomic DNA
agagtttgatcctggctcaggatgaacgctggcggcgtgcttaacacatgcaagtcgaacgaagcacctcgcccgatgaaatggagtgcttgcacaaagtggaatcaattgaggtgactgagtggcggacgggtgagtaacgcgtgggtaacctgccctatgcagggggatagcagttggaaacggctgataataccgcataagcgcacggtatcgcatgatacagtgtgaaaaactttcgtggcataggatggacccgcgtctgattagctagttggtgaggtaacggctcaccaaggcgacgatcagtagccgacctgagagggtgaccggccacattgggactgagacacggcccaaactcctacgggaggcagcagtggggaatattgcacaatgggcgaaagcctgatgcagcgacgccgcgtgagtgatgaagtatttcggtatgtaaagctctatcagcagggaagataatgacggtacctga

SEQ ID NO: 7393 - DNA, 490 bp, unidentified
  misc_feature 1..490: note = Ascusbbf_1858531, encodes 16S rRNA
  source 1..490: mol_type = genomic DNA
agagtttgatcctggctcaggacgaacgctggcggcgtgcttcatacatgcaagtcgaacggatgtactagcaatagtgcattagtggcggacgggtgagtaatacatgagtaacctgccttatacagggggataacacctagaaatgggtgctaataccgcataataacctagtatggcatcatattaagaggaaaggagaaatccggtaaaagatggactcatgttcgattagctagttggtagggtaaaggcctaccaaggcaacgatcgatagccgaactgagaggttgaacggccacattggaactgagaaacggtccagactcctacgggaggcagcagtggggaatattgcgcaatgggggaaaccctgacgcagcaacgccgtgtgaaggaagaaggctctagggttgtaaacttctttgattagggacgaaaaaaatgacggtacctaaagaacaagccacggctaactacgtgccagcag

SEQ ID NO: 7394 - DNA, 490 bp, unidentified
  misc_feature 1..490: note = Ascusbbf_319338, encodes 16S rRNA
  source 1..490: mol_type = genomic DNA
agagtttgatcatggctcaggatgaacgctggcggcgtgcttaacacatgcaagtcgaacgaagcactggaaaatggagattcgtcaaagttttcctttgactgagtggcgaacgggtgagtaatgcgtgagcaacctgcccttcagagggggacaacagttggaaacgactgctaataccgcatgatgtgttcgggcggcatcgtctgaacaccaaaggagaaatccgctgagggatgggctcacgtctgattagcttgttggcagggtaacggcctaccaaggcgacgatcagtagccggactgagaggttgaacggccacattgggactgagatacggcccagactcctacgggaggcagcagtggggaatattgggcaatgggcgaaagcctgacccagcaacgccgcgtgaaggaagaaggccttcgggttgtaaacttcttttaacagggacgaagaagtgacggtacctgttgaataagccac

SEQ ID NO: 7395 - DNA, 490 bp, unidentified
  misc_feature 1..490: note = Ascusbbf_81829, encodes 16S rRNA
  source 1..490: mol_type = genomic DNA
agagtttgatcatggctcaggacgaacgctggcggcgtgcctaacacatgcaagtcgaacggagtgcatttttgagattcgtcgaaagagtgtacttagtggcggacgggtgagtaatgcgtgagcaacctgcccttcggagggggacaacagttagaaatgactgctaataccgcatgatgtagctgggaggcatctcccggttaccaaagattttatcgccgaaggatgggctcacgtctgattagctggttggtggggtaacggcctaccaaggctgcgatcagtagccggactgagaggttgaacggccacattgggactgagatacggcccagactcctacgggaggcagcagtggggaatattgggcaatgggcgcaagcctgacccagcaacgccgcgtgaaggaagaaggccttcgggttgtaaacttcttttatgagggacgaaggacgtgacggtacctcatgaataagccacggctaac

SEQ ID NO: 7396 - DNA, 490 bp, unidentified
  misc_feature 1..490: note = Ascusbbf_240275, encodes 16S rRNA
  source 1..490: mol_type = genomic DNA
agagtttgatcatggctcaggatgaacgctggcggcgtgcctaacacatgcaagtcgagcgagaaatcgctcaatgatctttcgggtgatttgagcgatggaaagcggcggacgggtgagtaacgcgtaggtaacctgccccatacagagggatagccactggaaacggtgattaatacctcataacaccggaatatcgcatggtataccggtcaaagtttttcggtatgggatggacctgcgtctgattagctggttggtgaggtaacggctcaccaaggcgacgatcagtagccgacctgagagggtgatcggccacattggaactgagacacggtccaaactcctacgggaggcagcagtggggaatattgcacaatgggcgcaagcctgatgcagcaacgccgcgtgaacgaagaaggctcttgggtcgtaaagttctgttctgagggaagaagatctgacggtacctcaggagaaagccccggct

SEQ ID NO: 7397 - DNA, 490 bp, unidentified
  misc_feature 1..490: note = Ascusbbf_1590329, encodes 16S rRNA
  source 1..490: mol_type = genomic DNA
agagtttgatcatggctcaggataaacgctggcggcgcacataagacatgcaagtcgaacggaagtcgtcataatgatttcaatacagatttgaagatttatctgatatgaagttgagaatgatttatgacaatggctttagtggcggactggtgagtaacgcgtaagcaatctgcctattagaggggaataacagtgagaaatcattgctaataccgcatatgccatagtcatcgcatgatgacagtgggaaaggagcaatccgctaatagatgagcttgcgtctgattagctagttggtggggtaatggcctaccaaggcaacgatcagtagccggactgagaggttgaacggccacattgggactgagatacggcccagactcctacgggaggcagcagtcgggaatattgcgcaatggaggaaactctgacgcagtgacgccgcgtataggatgaaggttttcggattgtaaactattgtcgttag

SEQ ID NO: 7398 - DNA, 490 bp, unidentified
  misc_feature 1..490: note = Ascusbbf_420602, encodes 16S rRNA
  source 1..490: mol_type = genomic DNA
agagtttgatcctggctcaggacgaacgctggcggcgtgcttaacacatgcaagttgaacggtatgacatggaagcttgctgaagtgtcatatagtagcggacgggtgagtaatgcatgagaagctgccattgggagggggacaacagctggaaacggctgctaataccccgtatgccggaaggtgaaagggagtaatccgcccgatgaggtgctcatgtcctatcagctggttggtggggtaacggcctaccaaggcgacgacgggtagccggcctgagagggtgaacggccacactggaactgagatacggtccagactcctacgggaggcagcagtggggaatattgggcaatggaggaaactctgacccagcgacgccgcgtgagggaagacggccttcgggttgtaaacctcttttgtacgggaagaaggaagtgacggtactgtacgaataagtcccggctaactacgtgccagcagccgcggt

SEQ ID NO: 7399 - DNA, 490 bp, unidentified
  misc_feature 1..490: note = Ascusbbf_341365, encodes 16S rRNA
  source 1..490: mol_type = genomic DNA
agagtttgatcctggctcaggatgaacgctggctacaggcttaacacatgcaagtcggggggcagcatgcgggttgcttgcaacctgtgatggcgaccggcggatgggtgagtaacgcgtatccaaccttcccttaaccggggcataacctgccgaaaggcagactaattccccatgcactccaccgacggcatcagacgcggagtaaagggtatcggttatggatggggatgcgtccgattagcttgacggcggggcaacggcccaccgtggcaacgatcggtaggggttctgagaggaaggtcccccacattggaactgagacacggtccaaactcctacgggaggcagcagtgaggaatattggtcaatggacgagagtctgaaccagccaagtagcgtgcaggatgagggccctatgggttgtaaactgcttttatgcggggataaagtcacccacgtgtgggtgtttgcaggtaccgcatgaata

SEQ ID NO: 7400 - DNA, 490 bp, unidentified
  misc_feature 1..490: note = Ascusbbf_334165, encodes 16S rRNA
  source 1..490: mol_type = genomic DNA
agagtttgatcatggctcaggataaacgctggcggcgtgcctaatgcatgcaagtcgaacgggagcccatttatgggtcgaccgtggcggacgggtgaggaacacgtggctaacctgcccaacagtgggggataactccgggaaaccggggctaataccgcatacgctcagtagtggggacattgctgaggaaagtcgaaaggcgctgatggagggggctgcggccgattagttagttggtggggtaacggcttaccaagacagtgatcggtagctggtctgagaggacgatcagccacacggggactgagacacggccccgactcctacgggaggcagcagcaaggaattttccacaatgggcgcaagcctgatggagcaacgccgcgtgggggaagacgcttttcggagtgtaaaccccttttcgagaggacgaagcaaatgacggtactctcggaataaggaccggctaactacgtgccagcagccg

SEQ ID NO: 7401 - DNA, 490 bp, unidentified
  misc_feature 1..490: note = Ascusbbf_24295, encodes 16S rRNA
  source 1..490: mol_type = genomic DNA
agagtttgatcatggctcaggatgaacgctagcggcaggcctaacacatgcaagtcgaggggcagcgcggggtagcaataccctggcggcgaccggcgcacgggtgcgtaacgcgtatgcaacctgcccgcaacagggggataacggggtgaaaaccccactaataccccgtatggtcatgatttcgcatgggattgtgacgaaagccttggtggttgcggatgggcatgcgtgacattagctggttggtagggtaacggcctaccaaggcgacgatgtctaggggagctgagaggctaatcccccacactggtactgagacacggaccagactcctacgggaggcagcagtgaggaatattggtcaatggagggaactctgaaccagccatgccgcgtgcgggaagaaggccctatgggttgtaaaccgcttttgaccgggagtaataagggccgtgcgcggtccgatgagagtaccggtggaataagc

SEQ ID NO: 7402 - DNA, 490 bp, unidentified
  misc_feature 1..490: note = Ascusbbf_197974, encodes 16S rRNA
  source 1..490: mol_type = genomic DNA
agagtttgatcatggctcaggacgaacgctggcggcgtgcctaacacatgcaagtcgagcggagatattttccggaaagcttcggccggaagggggatattttagcggcggacgggtgagtaacgcgtgagcaacctttccttcacagggggataaagcaccgaaaggtgccctaataccgcatgagaccacggcatcacatgaagcaggggtcaaaggaggaatccggtgaagggtgggctcgcgtccgattagccagttggcggggtaacggcccaccaaagcgacgatcggtagccgacctgagagggtgatcggccacattggaactgagagacggtccaaactcctacgggaggcagcagtggggaatattgggcaatgggcgaaagcctgacccagcaacgccgcgtgagggaagaaggtcttcgggtcgtaaacctctgtcctcagtgaggagcagaagactgtagctgaggaggaagccccg

SEQ ID NO: 7403 - DNA, 490 bp, unidentified
  misc_feature 1..490: note = Ascusbbf_97935, encodes 16S rRNA
  source 1..490: mol_type = genomic DNA
agagtttgatcatggctcaggataaacgctggcggcgcgcataacacatgcaagtcgagcgagatgagtggcttcggtcatgaatctagcggcggacgggtgagtataatatgaacaacctgccttacagagggggatagccggaagaaatttcgattaataccgcatattctgttgtgatcacatgattgtaatgggaaagtccgaaaggacgctgtaagaggggtttgtatccgattagctagttggagtggtaacggcacaccaaggcgacgatcggtagctggttcgagaggatgtacagccacattgggactgagatacggcccagactcctacgggaggcagcagtggggaatattgcgcaatggaggaaactctgacgcagcgacgccgtgtaaaggatgaaggtcttcggatcgtaaacttatatcgattatgaaaagtaaggatggtaataaagtaagaagccccggctaactacgtgcca

SEQ ID NO: 7404 - DNA, 490 bp, unidentified
  misc_feature 1..490: note = Ascusbbf_109574, encodes 16S rRNA
  source 1..490: mol_type = genomic DNA
agagtttgatcctggctcaggatgaacgctagcgggaggcttaacacatgcaagtcgaggggcagcgcgggtggcaacacctggcggcgaccggcggacgggtgagtaacacgtatgcaacctgccctgcacagggggatagcccggagaaatccggattaataccccatggttcacgaaggccgcatggcttttgtggtaaagattcatcggtgcaggatgggcatgcgttccattagctagttggcggggcaacggcccaccaaggcgacgatggatatggggtctaaaaggatggtcccacacattggcactgagatacgggccaaactcctacgggaggcagcagtgaggaatattggtcaatgggcgagagcctgaaccagccatcccgcgtgcaggatgaaggtcttacagattgtaaactgcttttgcaggggacgaataaggatcacgtgtggtccgatgacagtactctgtgaataagcat

SEQ ID NO: 7405 - DNA, 490 bp, unidentified
  misc_feature 1..490: note = Ascusbbf_139325, encodes 16S rRNA
  source 1..490: mol_type = genomic DNA
agagtttgatcatggctcaggatgaacgctggcggcgtgcttaacacatgcaagtcgaacggacagaaattggtgaagttttcggatggaactgatggatgttagtggcggacgggtgagtaacgcgtaaacaatctgccttagagagggggataacagatagaaatatttgctaataccgcataagaccacaggtaggcatctactaggggtaaaaggagcaatccgctttaagatgagtttgcgtactattagctagttggtgaggtaacggcccaccaaggcaacgatggttagccggcctgagagggtgaacggccacattggaactgagaacggtccagactcctacgggaggcagcagtgaggaatattgggcaatggaggaaactctgacccagcaacgccgcgtgaaggaagaaggttttaggattgtaaacttctgttataggggaagaagaaagtgacggtaccctatgagaaagctacg

SEQ ID NO: 7406 - DNA, 490 bp, unidentified
  misc_feature 1..490: note = Ascusbbf_358284, encodes 16S rRNA
  source 1..490: mol_type = genomic DNA
agagtttgatcatggctcagattgaacgctagcggaatgctttacacatgcaagtcgaacggcagcgcaagagagcttgctctctggcggcgagtggcgaacgggtgagtaatgcatcggaacgtgcccagtagcgggggataactacgcgaaagcgtggctaataccgcatacgccctacgggggaaagggggggattcttcggaacctctcactattggagcggccgatgtcggattagctagttggtggggtaaaggcctaccaaggcgacgatccgtagctggtttgagaggacgaccagccacactgggactgagacacggcccagactcctacgggaggcagcagtggggaattttggacaatgggggcaaccctgatccagccattccgcgtgtgtgatgaaggccttcgggttgtaaagcacttttggcagagaagaaatggcgcgggctaatatcccgtgtcgatgacggtatctgcagaa

SEQ ID NO: 7407 - DNA, 490 bp, unidentified
  misc_feature 1..490: note = Ascusbbf_169198, encodes 16S rRNA
  source 1..490: mol_type = genomic DNA
agagtttgatcctggctcagattgaacgctggcggaatgctttacacatgcaagtcgaacggcagcacgggtgcttgcacctggtggcgagtggcgaacgggtgagtaacatatcggaacgtacccagtaatgggggataactaaccgaaaggttggctaataccgcatacgccctgagggggaaagcgggggaccgtaaggcctcgcgttattggagcggccgatatctgattagctagttggtggggtaaaggcctaccaaggcgacgatcagtagctggtctgagaggatgatcagccacactggaactgagacacggtccagactcctacgggaggcagcagtggggaattttggacaatgggggaaaccctgatccagccattccgcgtgagtgaagaaggccttcgggttgtaaagctctttcggcagggaagaaacgctctggactaatactccggggtaatgacggtacctgaagaagaagc

SEQ ID NO: 7408 - DNA, 490 bp, unidentified
  misc_feature 1..490: note = Ascusbbf_1445965, encodes 16S rRNA
  source 1..490: mol_type = genomic DNA
agagtttgatcctggctcaggatgaacgctagcggcaggcttaacacatgcaagtcgaggggcagcgcggggtagcactactctggcggcgaccggcggaagggtgcgtatcgcgtgagcaacttgcccgtcactgggggctaggcactggcaacggtgtgtaataccccataatatatggattcacatggattcatattgaaagattcgttggtgacggatgggctcgcgtaacattagctagtcggcgtggtaccggcccaccgaggctacgatgtttaggggttatgagaggaaggtcccacacactggaactgagacacgggccagacgcctacgggaggcagcagtggggaatattgggcaatgggcggaagcctgaaccagccatgccgcgtgcaggaataaggccctatgggtcgtaaactgcttttccttgagggcaataaggggcacgtgtggcccgatgagagtatcaggggaataagca

SEQ ID NO: 7409 - DNA, 490 bp, unidentified
  misc_feature 1..490: note = Ascusbbf_1576212, encodes 16S rRNA
  source 1..490: mol_type = genomic DNA
agagtttgatcatggctcaggacgaacgctggcggcgtgcttaacacatgcaagtcgagcggaaaggccccttgtgggtactcgagcggcgaacgggtgagtaacacgtgagtaacctgccccgaactctgggataagcccgggaaactgggtctaataccggatggtcatcgtctgctgcatggcaggggatggaaagtgttagcggttcgggatgggctcgcggcctatcagcttgttggtgaggtaatggcttaccaaggcttttacgggtagccggcctgagagggcgaccggccacactgggactgagatacggcccagactcctacgggaggcagcagtggggaatattgcgcaatgggcgaaagcctgacgcagcaacgccgtgtgagggatgacggccttcgggttgtaaacctctttcaccagggacgaagctttttgtgacggtacctggggaagaagcgccggccaactacgtgccagc

SEQ ID NO: 7410 - DNA, 490 bp, unidentified
  misc_feature 1..490: note = Ascusbbf_858724, encodes 16S rRNA
  source 1..490: mol_type = genomic DNA
agagtttgatcatggctcaggacgaacgctggcggcgtgcttaacacatgcaagtcgaacgctgaagcccacttcggtgggtggatgagtggcgaacgggtgagtaacacgtggacaatctgccctgcacttcgggataagccttggaaacgaggtctaataccggataggacactgcatcgcatggtgtggtgtggaaagcgtttaatgcggtgtgggatgagtccgcggcctatcagcttgttggtggggtgatggcctaccaaggcgacgacgggtagccggcctgagagggtgaccggccacactgggactgagacacggcccagactcctacgggaggcagcagtggggaatcttgcgcaatgggcggaagcctgacgcagcaacgccgcgtgggggatgacggccttcgggttgtaaacctctttcggcatcgacgaaggctctcgtgttcgggagttgacggtaggtgcagaagaagcaccgg

SEQ ID NO: 7411 - DNA, 490 bp, unidentified
  misc_feature 1..490: note = Ascusbbf_7437, encodes 16S rRNA
  source 1..490: mol_type = genomic DNA
agagtttgatcatggctcaggacgaacgctggcggcatgcttaatacatgcaagtcgaacgggatattgagggcttgcccttgatatctagtggcgaacgggtgagtaacacgtgagcaacctgcctatcacacagggataccagtccgaaaggattgctaataccggatgagatcacgggaccgcatggtcctgtggtaaaagctcaggcggtggtagatgggctcgcggtacattagctagttggtgaggtaacggcccaccaaggcgatgatgtatagccgacctgagagggtgatcggccacattgggactgagatacggcccagactcctacgggaggcagcagtaaggaatattgggcaatgggggcaaccctgacccagcaatgccgcgtgaaggaagaaggttttcggattgtaaacttcttttatataggacgaatggatgacggtactatatgaataagccccggctaactacgtgccag

SEQ ID NO: 7412 - DNA, 490 bp, unidentified
  misc_feature 1..490: note = Ascusbbf_286547, encodes 16S rRNA
  source 1..490: mol_type = genomic DNA
agagtttgatcctggctcaggatgaacgctagctacaggcttaacacatgcaagtcgcggggcatcgcgaagggtagcaatactctttggcggcgaccggcggatgggtgagtaacgcgtatccaacctggccctatctcgggcacagcccctcgaaagagggattaattcccgatgttcccgttagttcgcatgttctttcgggcaaaggtatttatcggatagggatggggatgcgttccattaggcagtcggcggggtaacggcccaccgagccgacgatggataggggttctgagaggaaggcccccaacactgggactgggacacggcccagactcctacgggaggcagcagtgaggaatattggtcaatggcggcaacgctgaaccagccaagtagcgtgagggattacggccctatgggttttaaacctcttttgttagggagcaacctatggcactagtgccatactgcgagtacctttcga

SEQ ID NO: 7413 - DNA, 490 bp, unidentified
  misc_feature 1..490: note = Ascusbbf_74130, encodes 16S rRNA
  source 1..490: mol_type = genomic DNA
agagtttgatcatggctcaggatgaacgctggcggcgtgcttaacacatgcaagtcgaacggaacttttctcccgaagaagcggagtgcttgcacaaagtggattcatttgaaaagtttagtggcggacgggtgagtaacgcgtgggtaacctgccgtatgccgggggacaacagttggaaacgactgctaataccgcataagcgcacactatcgcatgatagagtgtgaaaaactccggtggcatacgatggacccgcgtctgattagctagttggtgaggtagcggcccaccaaggcgacgatcagtagccggcctgagagggtgaacggccacattgggactgagacacggcccaaactcctacgggaggcagcagtggggaatattgcacaatgggggaaaccctgatgcagcgacgccgcgtgagtgaagaagtatttcggtatgtaaagctctatcagcaaggaagaaaatgacggtacttgac

SEQ ID NO: 7414 - DNA, 490 bp, unidentified
  misc_feature 1..490: note = Ascusbbf_1080579, encodes 16S rRNA
  source 1..490: mol_type = genomic DNA
agagtttgatcctggctcaggatgaacgctggcggcgtgcctaacacatgcaagtcgaacgggactattaggagatgatttcggtctgatcctaatagtttagtggcggacgggtgagtaacgcgtggacaacctgcctttcacagggggatagcagctggaaacggctggtaataccgcatacgctcatgtcaccgcatggtgatgtgaggaaagatttatcggtgaaagatggatccgcgtctgattagccagttggcggggtaacggcccaccaaagcgacgatcagtagccggcctgagagggcggacggcctcattgggactgagacacggcccagactcctacgggaggcagcagtgggggatattgcacaatgggcgcaagcctgatgcagcgacgccgcgtgagtgaagaagtatttcggtatgtaaagctctatcagcagggaagaaaggcccctttggggagatgacggtacctgactaa

SEQ ID NO: 7415 - DNA, 470 bp, unidentified
  misc_feature 1..470: note = Ascusbbf_59775, encodes 16S rRNA
  source 1..470: mol_type = genomic DNA
agagtttgatcctggctcagaacgaacgctggcggcaggcttaacacatgcaagtcgaacgcactcttcggagtgagtggcagacgggtgagtaacgcgtgggaacctacctagtagtacggaacaactgagggaaacttcagctaataccgtatacgccctacgggggaaagatttatcgctattagatgggcccgcgttggattagctagttggtggggtaatggcctaccaaggcgacgatccatagctggtctgagaggatgatcagccacactgggactgagacacggcccagactcctacgggaggcagcagtggggaatattggacaatgggcgaaagcctgatccagccatgccgcgtgagtgatgaaggccttagggttgtaaagctctttcagtggggacgataatgacggtacccacagaagaagccccggctaacttcgtgccagcagccgcggtaat

SEQ ID NO: 7416 - DNA, 490 bp, unidentified
  misc_feature 1..490: note = Ascusbbf_1568603, encodes 16S rRNA
  source 1..490: mol_type = genomic DNA
agagtttgatcatggctcaggatgaacgctggcggcgtgcctaacacatgcaagtcgaacggagatattccgccgttgaagcttcggcagaaacatggaacatcttagtggcggacgggtgagtaacgcgtggataacctgccctgtactgggggatagcagctggaaacggctggtaataccgcataagcgcacggtactgcatagtacagtgtgaaaaactccggtggtacaggatgggtccgcgtccgattagccagttggcggggtaacggcccaccaaagcgacgatcggtagccggcatgggagggcggacggccacattgggactgagacacggcccagactcctacgggaggcagcagtgggggatattgcacaatgggggaaaccctgatgcagcgacgccgcgtgggtgaagaagtatttcggtatgtaaagccctatcagcagggacgatgatgacggtacctgagtaagaagccccgg

SEQ ID NO: 7417 - DNA, 470 bp, unidentified
  misc_feature 1..470: note = Ascusbbf_174002, encodes 16S rRNA
  source 1..470: mol_type = genomic DNA
agagtttgatcctggctcagaacgaacgctggcggcaggcttaacacatgcaagtcgagcgctctcttcggagagagcggcggacgggtgagtaacgcgtgggaacatgcccgaaggtacggaacaaccgctggaaacggcggctaatgccgtatgtgccctatgggggaaagatttatcgccttcggattggcccgcgtcggattaggtagttggtggggtaatggctcaccaagccgacgatccgtagctggtttgagaggatgatcagccacactgggactgagacacggcccagactcctacgggaggcagcagtggggaatcttggacaatgggggaaaccctgatccagccatgccgcgtgagcgatgaaggccttagggttgtaaagctctttcacccgtgaagataatgacggtagcgggagaagaagccccggctaactccgtgccagcagccgcggtaat

SEQ ID NO: 7418 - DNA, 490 bp, unidentified
  misc_feature 1..490: note = Ascusbbf_146728, encodes 16S rRNA
  source 1..490: mol_type = genomic DNA
agagtttgatcctggctcaggatgaacgctggcggcgtgcctaacacatgcaagtcgaacggagcacattaagcgagaccttcgggtggaactttttatgcttagtggcggacgggtgagtaacgcgtgggtaacctgccttatacagggggataacagagagaaatttctgctaataccccataagcgcacagtatcgcatgatacagggtgaaaaggatttccggtataagatggacccgcgtctgattagccagttggcagggtaacggcctaccaaagcgacgatcagtagccgacctgagagggtgaccggccacattgggactgagacacggcccaaactcctacgggaggcagcagtggggaatattgcacaatgggggaaaccctgatgcagcgacgccgcgtgagtgaagaagtatttcggtatgtaaagctctatcagcagggaagataatgacggtacctgcacaagaagccccggcta

SEQ ID NO: 7419 - DNA, 490 bp, unidentified
  misc_feature 1..490: note = Ascusbbf_14326, encodes 16S rRNA
  source 1..490: mol_type = genomic DNA
agagtttgatcatggctcaggatgaacgctggcggcgtgcctaatacatgcaagtcgaacgagcgagaccaagcttgcttggttaagctagtggcgaacgggtgagtaatacgtaagcaacctgcctacacggactgggataacacctggaaacgggcgctaataccggataggtaacggaagggcatccttctgttattaaaggttagaaacacaagtagatgggcttacggtgcattagctagttggtgaggtaacggcccaccaaggcgatgatgcatagccggcctgagagggtgaacggccacattgggactgagacacggcccagactcctacgggaggcagcagtagggaattttcggcaatgggcgcaagcctgaccgagcaacgccgcgtgagtgatgaaggttttcggatcgtaaagctctgttgtaagggaagaacagcacggatagaatctgtgattgacggtaccttaccagaaagc

SEQ ID NO: 7420 - DNA, 490 bp, unidentified
  misc_feature 1..490: note = Ascusbbf_666737, encodes 16S rRNA
  source 1..490: mol_type = genomic DNA
agagtttgatcctggctcaggttgaacgctggcggcatgctttacacatgcaagtcgaacgagaatctggtgcttgcaccagaggaaagtggcggacgggtgagtaatatgtaggaaatctgccctagagagggggacaacagagggaaacttctgctaataccccatatgagcgtacttgaaatagtattcttgaaaactccggtgctctaggatgagcctgcatctgattagcttgttggcggtgtaatggaccaccaaggcgacgatcagtagctggtttgagaggatgatcagcctcaatgggactgagacacggcccatactcctacgggaggcagcagtagggaattttgcgcaatgggcgaaagcctgacgcagcaacgccgcgtgtgtgatgacgcccttcggggtgtaaaacactgtcagtagggacgaaacttgacggtacctacagaggaagcgccggctaactccgtgccagcagccg

SEQ ID NO: 7421 - DNA, 490 bp, unidentified
  misc_feature 1..490: note = Ascusbbf_418277, encodes 16S rRNA
  source 1..490: mol_type = genomic DNA
agagtttgatcctggctcagaacgaacgctggcggcgcgtcttaagcatgcaagtcgggcgggaacgggaagcttgcttcccgcgagagcggcggactggtgagtaacgcgtgggtgacgtaccccccggacggggacagcctgcagaaatgcagggtaataccggatacggttctgtatattggaagtacagaaggaaaggagctacggctccgccgggggaacggcctgcggcccatcagctggtcggcggggtaaaggcccaccgaggcgatgacgggtacccggcctgagagggcggacgggcacattgggactgagatacggcccagactcctacgggaggcagcagctaagaatattccgcaatgggggaaaccctgacggagcgacgccgcgtggacgaggaaggccggaaggttgtaaagtccttttggggccgaggaataagtacgggagggaatgcccgtatggtgactgtaagccctga

SEQ ID NO: 7422 - DNA, 490 bp, unidentified
  misc_feature 1..490: note = Ascusbbf_71537, encodes 16S rRNA
  source 1..490: mol_type = genomic DNA
agagtttgatcctggctcaggacgaacgctggcggcgcgcctaacacatgcaagtcgaacggagatcatttggtagaagttttcggatggacaccgggtgatcttagtggcgaacgggtgagtaacgcgtgagcaatctgcctcagagtgggggacaacagttggaaacgactgctaataccgcataagcccacagcaccgcatggtgcagggggaaaagatttattgctttgagatgagctcgcgtccaattagctggttggtgaggtaacggcccaccaaggcgacgattggtagccggactgagaggttgaacggccacattgggactgagatacggcccagactcctacgggaggcagcagtggggaatattgcacaatggggggaaccctgatgcagcgacgccgcgtggaggaagaaggtcttcggattgtaaactcctgttgttagggacgataatgacggtacctaacaaggaagcaccggc

SEQ ID NO: 7423 - DNA, 490 bp, unidentified
  misc_feature 1..490: note = Ascusbbf_33981, encodes 16S rRNA
  source 1..490: mol_type = genomic DNA
agagtttgatcatggctcaggatgaacgctggcggcgtgcttaacacatgcaagtcgaacggagtttattgagaagcttgctttttggtaaacttagtggcggacgggtgagtaacgcgtgggtaacctgccttataccgggggataacgtctggaaacggacgctaataccgcataagcgcacggacaggcatctgtcagtgtgaaaaactccggtggtataagatggacccgcgtctgattagatagttggtgaggtaacggctcaccaagtcgacgatcagtagccggcctgagagggtgaacggccacattgggactgagacacggcccaaactcctacgggaggcagcagtggggaatattgcacaatgggggaaaccctgatgcagcgacgccgcgtgagtgaagaagtatttcggtatgtaaagctctatcagcagggaagaaaatgacggtacctgagtaagaagccccggctaactacgtg

SEQ ID NO: 7424 - DNA, 490 bp, unidentified
  misc_feature 1..490: note = Ascusbbf_262889, encodes 16S rRNA
  source 1..490: mol_type = genomic DNA
agagtttgatcatggctcaggacgaacgctggcggcgtgcttaacacatgcaagtcgaacgaagcttgaagaatgaattcttcggaatgatttctgatatgactgagtggcggacgggtgagtaacgcgtgagcaacctgcccttcggagggggatagtgtctggaaacggacagtaataccgcataaagttaggatatggcatcataacctaaccaaagatttatcgccgagggatgggctcgcgtctgattagatagttggtggggtaacggcctaccaagtcgacgatcagtagccggactgagaggttgatcggccacattgggactgagacacggcccagactcctacgggaggcagcagtggggaatattgcacaatgggggaaaccctgatgcagcaacgccgcgtggaggaagacggttttcggattgtaaactcctgttcttagggaagaagacagtgacggtacctaaggagcaagccac

SEQ ID NO: 7425 - DNA, 490 bp, unidentified
  misc_feature 1..490: note = Ascusbbf_66072, encodes 16S rRNA
  source 1..490: mol_type = genomic DNA
agagtttgatcatggctcaggatgaacgctggcggcgtgcttaacacatgcaagtcgaacggagactgcgattgaagctgaagtagcttgctatggatgtggatatcgtattcttagtggcggacgggtgagtaacgcgtgggtaacctacctcatacaggggaatagcagttggaaacgactgataaaaccgcataaaacggcagcagggcatcctgcaaccgtcaaatatttataggtatgagatgggcccgcgtctgattaggcagttggcgaggtaacggctcaccaaaccgacgatcagtagccggcctgagagggtgaacggccacattgggactgagacacggcccaaactcctacgggaggcagcagtggggaatattggacaatgggggcaaccctgatccagcgacgccgcgtgagtgaagaagtatttcggtatgtaaagctctatcagcagggaagatgatgacggtacctgactaag

SEQ ID NO: 7426 - DNA, 490 bp, unidentified
  misc_feature 1..490: note = Ascusbbf_318675, encodes 16S rRNA
  source 1..490: mol_type = genomic DNA
agagtttgatcctggctcaggacgaacgctggcggcgtgcctaacacatgcaagtcgaacggaactctctggaacaaggcttcggccaagggaatttgagtttagtggcggacgggtgagtaacgcgtgagcaacctgcccttcggagggggacaacagttggaaacgactgctaataccgcatgacatacaggaatcgcatggtttttgtatcaaagatttatcgccgagggatgggctcgcgtctgattagctagttggtggggtaacggcctaccaaggcgacgatcagtagccggactgagaggttgaacggccacattgggactgagatacggcccagactcctacgggaggcagcagtggggaatattgggcaatgggggcaaccctgacccagcaacgccgcgtgaaggaagaaggctttcgggttgtaaacttcttttatcagggacgataatgacggtacctgatgaataagccacggcta

SEQ ID NO: 7427 - DNA, 490 bp, unidentified
  misc_feature 1..490: note = Ascusbbf_395006, encodes 16S rRNA
  source 1..490: mol_type = genomic DNA
agagtttgatcctggctcaggacgaacgctggcggcgtgcctaacacatgcaagtcgaacgagaatcagtttattgatcccttcggggtgatttagattgaggacagtggcggacgggcgagtaacgcgtgagtaacctgcccataagagagggatagccgatggaaacgtcgagtaatacctcatattgtagtgagatcgcatggtttcactatgaaagatttatcgcttatggatggactcgcgtctgattagatagttggcgaggtaacggctcaccaagtcgacgatcagtagccgaactgagaggttgatcggccgcattgggactgagacacggcccagactcctacgggaggcagcagtggggaatattgcgcaatggggggaaccctgacgcagcaacgccgcgtgcaggaagaaggtcttcggattgtaaactgttgtcgcaagggaagaagaaagtgacggtaccttgtgagaaagtcac

SEQ ID NO: 7428 - DNA, 490 bp, unidentified
  misc_feature 1..490: note = Ascusbbf_192268, encodes 16S rRNA
  source 1..490: mol_type = genomic DNA
agagtttgatcctggctcaggatgaacgctggcggcgtgcctaacacatgcaagtcgagcgaagatttagaggagtacttgtacaaatttaaatcttagcggcggacgggtgagtaacacgtgagtaacctgcccttcagtggggaataacaacgagaaatcgttgctaataccgcataatgttatcggatcgcatggtctgataaccaaaggatttattcgctgaaggatggactcgcgtccgattagctagttggtgaggtaatggctcaccaaggcaacgatcggtagccgaactgagaggttgatcggccacattgggactgagacacggcccagactcctacgggaggcagcagtggggaatattgggcaatgggggaaaccctgacccagcaacgccgcgtgaaggaagaaggtcttcggattgtaaacttctttgatcagggacgaacaaaatgacggtacctgaggaacaagccacggctaa

SEQ ID NO: 7429 - DNA, 490 bp, unidentified
  misc_feature 1..490: note = Ascusbbf_435875, encodes 16S rRNA
  source 1..490: mol_type = genomic DNA
agagtttgatcctggctcaggatgaacgctggcggcgtgcctaacacatgcaagtcgaacggggataaggcgctgagaagcttcggccaatcttgccttatcctagtggcggacgggtgagtaacgcgtggataacctgcccctttctgggggacaacagccggaaacggctgctaataccgcataagcttcatagatcgcatggtctgtggaggaaaggagagatccgggaagggatggatccgcgtccgattagccagttggcggggtaacggcccaccaaagcgacgatcggtagccggcctgagagggcggacggccacattgggactgagacacggcccagactcctacgggaggcagcagtgggggatattgcacaatgggggaaaccctgatgcagcgacgccgcgtgggtgaagaagcttttcggagtgtaaagccctatcagcagggaagaaagcccgcaagggttagacggtacctgact

SEQ ID NO: 7430 - DNA, 490 bp, unidentified
  misc_feature 1..490: note = Ascusbbf_7504, encodes 16S rRNA
  source 1..490: mol_type = genomic DNA
agagtttgatcatggctcaggacgaacgctggcggcgtgcttaacacatgcaagtcgaacgaagattatggagagcttgcttgaaataatctgagtggcggacgggtgagtaacgcgtgaataatctgtcctatacagggggataacgcatcgaaagatgtgctaataccgcgtaggaccacggtactgcatggtactgaggtgaaaggagcaatccagtatagggtgagttcgcgtctgattagatagttggtgaggtaacggcccaccaagtcaacgatcagtagccgacctgagagggtgatcggccacattgggactgagacacggcccagactcctacgggaggcagcagtggggaatattgggcaatgggcgaaagcctgacccagcaacgccgcgtgaaggaagaaggttttcggattgtaaacttctgtcctatgtgaagagaagtagacggtagcataggaggaagccccggctaactacg

SEQ ID NO: 7431 - DNA, 490 bp, unidentified
  misc_feature 1..490: note = Ascusbbf_64935, encodes 16S rRNA
  source 1..490: mol_type = genomic DNA
agagtttgatcatggctcaggatgaacgctggcggcgtgcctaacacatgcaagtcgaacgaagcacataccttcggggatgtgactgagtggcggacgggtgagtaacgcgtgggtaacctgccctctacagggggacaacagccagaaatggctgctaataccgcataagcgcacggggaggcatcttcccgtgtgaaaaactacggtggtagaggatgggcccgcgtctgattagctggttggcggggtaaaagcccaccaaggcgacgatcagtagccggtctgagaggatgaacggccacattggaactgagacacggtccaaactcctacgggaggcagcagtgagggatattgcacaatgggggaaaccctgatgcagcaacgccgcgtgggtgaagaagtatttcgatatgtaaagccctatcagcagggaagatgatgacggtacctgactaagaagctccggctaaatacgtgccagcag

SEQ ID NO: 7432 - DNA, 490 bp, unidentified
  misc_feature 1..490: note = Ascusbbf_391313, encodes 16S rRNA
  source 1..490: mol_type = genomic DNA
agagtttgatcctggctcaggacgaacgctggcggcgtgcttcaaacatgcaagtcgaacgagactcgagggagcttgctcctaagagtctagtggcggacgggtgagtaacgcgtgagcaatctggctattacagggggataacacttggaaacgagtgctaataccgcgtatgaccacaacctggcatcaggaaggggtgaaaggagaaatccggtaataggtgagcttgcgtttcattagctagttggtgaaggtaacggcccaccaaggcgacgatgaatagccgatctgagaggatgaccggccacactggaattgagaacggtccagactcctacgggaggcagcagttaggaatattgggcaatggaggaaactctgacccagcaacgccgcgtgaaggaagaaggttttcggattgtaaacttctgatctgtgggaagaagagagtgacggtaccacaggagaaagccacggctaactacgt

SEQ ID NO: 7433 - DNA, 490 bp, unidentified
  misc_feature 1..490: note = Ascusbbf_122323, encodes 16S rRNA
  source 1..490: mol_type = genomic DNA
agagtttgatcctggctcaggatgaacgctagcgacaggcctaacacatgcaagtcgaggggcagcatggttgtagcaatacaactgatggcgaccggcaaacgggtgagtaacaagtgagcaacctgcctataactggaggataacccgtcgaaagacggactaatactgcataatattgagataccgcatgatatttcaattaaactttttgggttatagatgggctcgccttccattagctagttggtaaggtaacggcttaccaaggcgacgatggataggggttctgagaggaaggtcccccacattggtactgagacacggaccaaactcctacgggaggcagcagtgaggaatattggtcaatggacggaagtctgaaccagccaagtcgcgtgcaggaagactgccctatgggttgtaaactgcttttatataggaataaaaaaatctacgtgtaggttattgtaggtactataagaataag

SEQ ID NO: 7434 - DNA, 490 bp, unidentified
  misc_feature 1..490: note = Ascusbbf_722034, encodes 16S rRNA
  source 1..490: mol_type = genomic DNA
agagtttgatcatggctcaggatgaacgctggcggcgtgcctaacacatgcaagtcgaacggtgaaaccgcctccgggcggacatggagtggcgaacgggtgagtaacacgtgaccaacctgccccgcgcaccgggacagccccccgaaagggggattaataccggatactccgcccctcccgcatgggaggggcgggaaagctccggcggcgcgggatggggtcgcggcccatcaggtagtaggcggggtagcggcccgcctagccgacgacgggtagccgggttgagagaccgaccggccacattgggactgagatacggcccagactcctacgggaggcagcagtggggaatattgcgcaatgggggcaaccctgacgcagcaacgccgcgtgcgggacgaaggcactcgtgtcgtaaaccgctttcagcagggaagacatcgacggtacctgcagaagaagccccggctaactacgtgccagcagc

SEQ ID NO: 7435 - DNA, 480 bp, unidentified
  misc_feature 1..480: note = Ascusbbf_205680, encodes 16S rRNA
  source 1..480: mol_type = genomic DNA
agagtttgatcctggctcaggatgaacgctggcggcgtgcctaatacatgcaagtcgagcggaaaggctccttcgggagtactcgagcggcggacgggtgagtaacgcgtaagaatgtaccccaaactgagggataactgctcgaaagagtagctaataccgcatgtgctcttcggagtaaagcttcggcggtttgggaacagcttgcgtatgattagctagttggtaaggtaatggcttaccaaggcgacgatcattagctggtctgagaggatgatcagccacactgggactgagacacggcccagactcctacgggaggcagcagtagggaattttccacaatgggggcaaccctgatggagcaacgccgcgtgcaggatgaaggccttcgggttgtaaactgcttttgtctgtgacgaatatgacggtagcagacgaataaggatcggctaactacgtgccagcagccgcggtaat

SEQ ID NO: 7436 - DNA, 490 bp, unidentified
  misc_feature 1..490: note = Ascusbbf_252696, encodes 16S rRNA
  source 1..490: mol_type = genomic DNA
agagtttgatcatggctcaggatgaacgctggcggcgtgcctaacacatgcaagtcgaacgggacttattatgacgatttcggtctgaattttaagtttagtggcggacgggtgagtaacgcgtggacaacctgcctttcacagggggatagcagctggaaacggctggtaataccgcatacgctcagtgcaccgcatggtgtattgaggaaagatttatcggtgaaagatggatccgcgtctgattagccagttggcggggtaacggcccaccaaagcgacgatcagtagccggcctgagagggcggacggccacattgggactgagacacggcccagactcctacgggaggcagcagtgggggatattgcacaatgggcgcaagcctgatgcagcgacgccgcgtgagtgaagaagtatttcggtatgtaaagctctatcagcagggaagaaaggcccattagggagatgacggtacctgactaagaa

SEQ ID NO: 7437 - DNA, 490 bp, unidentified
  misc_feature 1..490: note = Ascusbbf_245797, encodes 16S rRNA
  source 1..490: mol_type = genomic DNA
agagtttgatcatggctcaggatgaacgctggcggcgtgcctaacacatgcaagtcgaacgatgaagcggggaggaagttttcggatggaattcctgtggaagagtggcggacgggtgagtaacgcgtggataacctgccccgtacagggggatagcagcgggaaactgctggtaataccgtatatgcgcacaactgtcgcatgacagggtgtggaaagttacggcggtacgggatgggtccgcgtccgattagccagttggcggggtaaaggcccaccaaagcgacgatcggtagccggcctgagagggcggacggccacattgggactgagacacggcccagactcctacgggaggcagcagtgggggatattgcacaatgggggaaaccctgatgcagcgacgccgcgtgggtgaagaagtatttcggtatgtaaagccctatcagcagggacgatgatgacggtacctgcagaagaagccccggct

SEQ ID NO: 7438 - DNA, 490 bp, unidentified
  misc_feature 1..490: note = Ascusbbf_687263, encodes 16S rRNA
  source 1..490: mol_type = genomic DNA
agagtttgatcctggctcaggatgaacgctagcggcaggcctaacacatgcaagtcgaggggtagagttagcttgctaacttgagaccggcgcacgggtgcgtaacgcgtatgcaatctaccttttactaaggaatagcccagagaaatttggattaatgccttatagtatgttaagatggcatcatttaaacattaaagaacttcggtaaaagatgagcatgcgtcccattagttagttggtaaggtaacggcttaccaagacgatgatgggtaggggtcctgagagggagatcccccacactggtactgagacacggaccagactcctacgggaggcagcagtgaggaatattggtcaatggaggcaactctgaaccagccatgccgcgtgcaggaagacggtcctatggattgtaaactgcttttgtacaggaagaaaaagtatcacgagtggtatattgacggtactgtaagaataaggatcggct

SEQ ID NO: 7439 - DNA, 490 bp, unidentified
  misc_feature 1..490: note = Ascusbbf_20073, encodes 16S rRNA
  source 1..490: mol_type = genomic DNA
agagtttgatcctggctcaggatgaacgctagctacaggcttaacacatgcaagtcgaggggcatcagggatccagcttgctggatttgctggcgaccggcgcacgggtgagtaacgcgtatccaacctgtcccatagtagggaacagcccggcgaaagtcggattaatgccctatgttgttccttgagagcatttgattggaaccaaagatttatcgctatgggttggggatgcgtccgattaggtagacggcggggtaacggcccaccgtgccttcgatcggtaggggttctgagaggaaggtcccccacattggaactgagacacggtccaaactcctacgggaggcagcagtgaggaatattggtcaatgggcgcgagcctgaaccagccaagtagcgtgcaggatgacggccctatgggttgtaaactgcttttggaggggaataaagtcgcctacgcgtaggtgtttgcatgtaccctcagaat

SEQ ID NO: 7440 - DNA, 490 bp, unidentified
  misc_feature 1..490: note = Ascusbbf_5254, encodes 16S rRNA
  source 1..490: mol_type = genomic DNA
agagtttgatcatggctcaggatgaacgctggcggcaggcttaatacatgcaagttgaacggtaacatgagagtagcaatacttttgatgacgagtggcgtacgggtgcgtaacacgtgtgcaacctaccttataccggaacaaaacatcgagaaattggtgctaatattccataacattatagataggcatctatttataattaaagatacgttggtatgagatgggcacgcggtccattagctagttggtaaggtaacggcttaccaaggcgacgatggataggggttctgagaggattaccccccacattggaactgagacacggtccaaactcctacgggaggcagcagtaaggaatattggtcaatggaggcaactctgaaccagccatgccgcgtgcaggaagacggccctatgggttgtaaactgcttttattagaggataaagtgatgcacgtgtgcattattgcaggtatctaatgaataa

SEQ ID NO: 7441 - DNA, 490 bp, unidentified
  misc_feature 1..490: note = Ascusbbf_152278, encodes 16S rRNA
  source 1..490: mol_type = genomic DNA
agagtttgatcatggctcaggatgaacgctagcggcaggcttaacacatgcaagtcgaggggcagcgcggtgtagcaatacactggcggcgaccggcggaagggtgcgtaacgcgtgagcaacatgcccgtatcagggggataatcggtggaaacgccgtctaatactccataacacttttttggacatccaggggagttgaaagcttttttgcggatacggattggctcgcgtgacattagctggttggcggggtaacggcccaccaaggcgacgatgtctaggggttctgagaggaaggtcccccacactggaactgagacacggtccagactcctacgggaggcagcagtgaggaatattggtcaatgggcggaagcctgaaccagccatgccgcgtgcaggaataaggccctacgggtcgtaaactgcttttgacgtggagcaataaggactacgtgtagtctgatgagagtactcgtcgaataag

SEQ ID NO: 7442 - DNA, 490 bp, unidentified
  misc_feature 1..490: note = Ascusbbf_127942, encodes 16S rRNA
  source 1..490: mol_type = genomic DNA
agagtttgatcctggctcaggatgaacgctggcggcgtgcctaacacattcaagtcgaacggtgaagggacttcggtcccggatcagtggcggacgggtgagtaacgcgtgagcaacctgcctttgcttgggggataacgtttggaaacgaacgctaataccgcataaaacagcattccggcatcgggaagctgtcaaagatttattgagcagagatgggctcgcgtccgattagatagttggtgaggtaacggctcaccaagtcgacgatcggtagccggactgagaggttgaacggccacattggaactgagatacggtccagactcctacgggaggcagcagtggggaatattgggcaatgggcgaaagcctgacccagcgacgccgcgtgaaggaagaaggccctcgggttgtaaacttcagtcaacagggaagaaacaaatgacggtacctgtggaggaagccacggctaactacgtgccagcag

SEQ ID NO: 7443 - DNA, 490 bp, unidentified
  misc_feature 1..490: note = Ascusbbf_1801352, encodes 16S rRNA
  source 1..490: mol_type = genomic DNA
agagtttgatcctggcttaggacgaacgctggcggcgtgcctaatacatgcaagtcgggcggagcccgaggggagcttgctccttttcgggctcagcggcggacgggtgagtaacacgtgggtaacctgcccgtaagaccgggataactccgggaaaccggggctaataccggataacaccgggggccccatggcttccggttgaaaggcggcctttggctgccacttacggatgggcccgcggcgcattagctagttggcggggtaacggcccaccaaggcgacgatgcgtagccggcctgagagggtggacggccacactgggactgagacacggcccagacccctacgggaggcagcagtagggaatcttccgcaatgggcgaaagcctgacggagcgacgccgcgtgagcgaggaaggccttcgggtcgtaaagctctgttgtcagggaagaaggcgcgccgttcgaatagggcggcgcggtgacg

SEQ ID NO: 7444 - DNA, 490 bp, unidentified
  misc_feature 1..490: note = Ascusbbf_26832, encodes 16S rRNA
  source 1..490: mol_type = genomic DNA
agagtttgatcctggctcaggataaacgctggcggcgcacataagacatgcaagtcgaacggacttaatcgattcttttagattcgaagcggttagtggcggactggtgagtaacgcgtgagcaacctgcctatcagaggggaataacagtgagaaatcattgctaataccgcatatgctcacagtatcacatgatgctgtgaggaaaggagcaatccgctgatagatgggctcgcgtctgattagctagttggtggggcaacggcctaccaaggcgacgatcagtagccggactgagaggttgaacggccacattgggactgagatacggcccagactcctacgggaggcagcagtcgggaatattgcgcaatggaggaaactctgacgcagtgacgccgcgtataggaagaaggttttcggattgtaaactattgtcgttagggaagaaacaagacagtacctaaggaggaagccccggctaactatg

SEQ ID NO: 7445 - DNA, 490 bp, unidentified
  misc_feature 1..490: note = Ascusbbf_42599, encodes 16S rRNA
  source 1..490: mol_type = genomic DNA
agagtttgatcctggctcaggacgaacgctggcggcgtgcttaacacatgcaagtcgaacgaggtttatggaagagcttgctcggaagtaaaccgagtggcggacgggtgagtaacgcgtgagcaacctgtctcacacaggggaataacgcatcgaaagatgtgctaataccgcataggaccacgggagggcatccttccgaggtgaaaggagcaatccggtgtgaggtgggctcgcgtctgattagatagttggtggggtaacggcctaccaagtcaacgatcagtagccgacctgagagggtgatcggccacattgggactgagacacggcccagactcctacgggaggcagcagtggggaatattgggcaatgggcgcaagcctgacccagcaacgccgcgtgaaggaagaaggttttcggatcgtaaacttctgtccttggtgaagataatgacggtagccaaggaggaagccccggctaactacg

SEQ ID NO: 7446 - DNA, 490 bp, unidentified
  misc_feature 1..490: note = Ascusbbf_21325, encodes 16S rRNA
  source 1..490: mol_type = genomic DNA
agagtttgatcatggctcaggatgaacgctagcgggaggcttaacacatgcaagtcgaggggcagcgcggggtagcaataccctggcggcgaccggcagacgggtgagtaacacgtatgcaacctgccctgcacaggggaatagcccggagaaattcggattaatgccccatggtccgcgggagccgcatggcttcttcggtaaagattcatcggtgcaggatgggcatgcgttccattagctagttggcggggtaacggcccaccaaggcgacgatggatatggggtctaaaaggatggtcccacacattggcactgagatacgggccaaactcctacgggaggcagcagtgaggaatattggtcaatgggcgagagcctgaaccagccatcccgcgtgcaggatgaaggtcttacagattgtaaactgcttttgctggggacgaataaggggtacgcgtaccccgatgacagtactcagtgaataagc

SEQ ID NO: 7447 - DNA, 490 bp, unidentified
  misc_feature 1..490: note = Ascusbbf_24524, encodes 16S rRNA
  source 1..490: mol_type = genomic DNA
agagtttgatcatggctcaggatgaacgctagcggcaggcttaacacatgcaagtcgaggggcagcgcgaggtagcaatactttggcggcgaccggcggaagggtgcgtaacgcgtgagcaacttgcccgtatctgggacataaccggtggaaacgccgactaatttcccataacaacagagatgacatcttctttgtttgaaagcttcggtggatacggatgggctcgcgtgacattagctagttggagtggtaacggcacaccaaggcgacgatgtctaggggttctgagaggaaggtcccccacactggaactgagacacggtccagactcctacgggaggcagcagtgaggaatattggtcaatgggcggaagcctgaaccagccatgccgcgtgcaggaataaggccctatgggtcgtaaactgcttttgacggggagcaataagggctacgcgtagcccgatgagagtactcgtcgaataagca

SEQ ID NO: 7448 - DNA, 490 bp, unidentified
  misc_feature 1..490: note = Ascusbbf_212721, encodes 16S rRNA
  source 1..490: mol_type = genomic DNA
agagtttgatcctggctcaggatgaacgctggcggcgtgcctaatacatgcaagtcgagcggcttggggagcaatccccttgcagcggcgaacgggtgagtaacacgtaggcaacctgcctttgagactgggatacccaggcgaaagcttggctaataccggataacaacgaggaccgcatggtccccgcttgaaaggtgctccaaagcaccgctcttagatgggcctgcggcacattagctagttggtgaggtaacggcccaccaaggcgaggatgtgtagccgacctgagagggtgaccggccacaatgggactgagacacggcccatactcctacgggaggcagcagtagggagttttcggcaatgggcgaaagcctgaccgagcaacgccgcgtgagtgatgaaggtcttcggatcgtaaagctctgttacgagggaaaaacacgcccgcgaggaaatgcgcggacgccgatggtacctcgccaga

SEQ ID NO: 7449 - DNA, 490 bp, unidentified
  misc_feature 1..490: note = Ascusbbf_128794, encodes 16S rRNA
  source 1..490: mol_type = genomic DNA
agagtttgatcatggctcagattgaacgctggcggcaggcctaacacatgcaagtcgagcggtaacagtccttcgggagctgacgagcggcggacgggtgaggaatgcttgggaatctgcccgatagagggggataactacgggaaactgtagctaataccgcatgatctctaaggagcaaagcgggggaccttcgggcctcgcgctatcggatgagcccaagtgggattagctagttggtggggtaaaggctcaccaaggcgacgatctctaactggtctgagaggatgatcagtcacactggaactgagacacggtccagactcctacgggaggcagcagtggggaatattggacaatgggggcaaccctgatccagccatgccgcgtgtgtgaagaaggccttcgggttgtaaagcacttttggcggggaggaagaagcgtttgtgaataatgaacgcttttgacgttacccgcagaataagcaccg

SEQ ID NO: 7450 - DNA, 490 bp, unidentified
  misc_feature 1..490: note = Ascusbbf_151349, encodes 16S rRNA
  source 1..490: mol_type = genomic DNA
agagtttgatcatggctcagaacgaacgctggcggcaggcttaacacatgcaagttgaacgggatccttgaaatagcttgctattttaaggtgagagtagcgcacgggtgagtaacacgtgggaacataccatacagtgggggataacaattggaaacgattgataataccgcataagcccgagaggggaaaggagaaattcgctgaatgattggcccgcggaagattaggcagttggtggggtaaaggcctaccaaacctacgatctatagctggtctgagaggacgatcagccacattgggactgagacacggcccaaactcctacgggaggcagcagtgaggaatattgggcaatgggggaaaccctgacccagccatgccgcgtgagtgatgaaggttttcgaattgtaaagctctttcggatgtgaagatgatgacggtagcatctaaagaagccccggcaaacttcgtgccagcagccgcggta

SEQ ID NO: 7451 - DNA, 490 bp, unidentified
  misc_feature 1..490: note = Ascusbbf_164986, encodes 16S rRNA
  source 1..490: mol_type = genomic DNA
agagtttgatcctggctcaggataaacgctagcggcaggcctaacacatgcaagtcgagcggtaacacggtgtagcaatacattggtgacgagcggcggacgggtgagtaacgcgtatgcaacctacccactacacaaggatagccttccgaaaggaggattaatacttgatagtactctaagatggcatcaaaacagagttaaagatttatcggtagtggatgggcatgcgtggcattagttagttggcggggtaacggcccaccaagacgatgatgcctaggggttctaaaaggaagatcccccacatcggtactgagacacggaccgaactcctacgggaggcagcagtgaggaatattggacaatggaggagactctgatccagccaaaccgcgtgaaggaagaaggttctctgaatcgtaaacttcttttgtaagagaataaaagtagctatgtatagcgatttgaatgtaccttacgaataagc

SEQ ID NO: 7452 - DNA, 490 bp, unidentified
  misc_feature 1..490: note = Ascusbbf_304006, encodes 16S rRNA
  source 1..490: mol_type = genomic DNA
agagtttgatcatggctcaggatgaacgctggcggcgtgcctaacacatgcaagtcgaacggaaacaggactttcgctaagcttcggcttagttgttttgttttagtggcggacgggtgagtaacgcgtggacaacctgccgtatacagggggataacagagagaaatttctgctaataccgcataagcgcacggggaggcatcttcttgtgtgaaaagatttatcggtatacgatggatccgcgtctgattagccagttggcggggtaaaggcccaccaaagcgacgatcagtagccggcctgagagggtgaacggccacattgggactgagagacggcccaaactcctacgggaggcagcagtgggggatattgcacaatgggggaaaccctgatgcagcgacgccgcgtgagtgaagaagtatttcggtatgtaaagctctatcagcagggaagaagcagacggtacctgactaagaagcaccggct

SEQ ID NO: 7453 - DNA, 490 bp, unidentified
  misc_feature 1..490: note = Ascusbbf_1502957, encodes 16S rRNA
  source 1..490: mol_type = genomic DNA
agagtttgatcctggctcaggatgaacgctagctacaggcctaacacatgcaagtcgaggggcatcgcgcgggtgagcgatcacctgtggcggcgaccggcggatgggtgagtaacgcgtatccaacctgccccaagcccgggcacagcccctggaaacggggagtgactcccgatagcgcggagacgccgcatggcggttccgctaaattccgaggcttgggatgggggtgcgtccgattaggtagttggcggggcaacggcccaccaagccgacgatcggtaggggttctgagaggaaggtcccccacattgggactgagacacggcccaaactcctacgggaggcagcagtgaggaatattggtcaatgggcggaagcctgaaccagccaagtagcgtggaggatgacggccctacgggttgtaaactcctttagcgcggggataacatgctccacgtgtggggcactgcaggtaccgcgagaataa

SEQ ID NO: 7454 - DNA, 490 bp, unidentified
  misc_feature 1..490: note = Ascusbbf_1787950, encodes 16S rRNA
  source 1..490: mol_type = genomic DNA
agagtttgatcatggctcaggatgaacgctggcggcatgcctaagacatgcaagtcgaacggagcggcctattgaagacggagtgcttgcacaaagttggatttagattcccgctcagtggcagacgggtgagtaacacgtgggtaatctaccctagagactgggacaacagttggaaacgactgctaataccggataattcatatttagaaaactagatatgctaaaaggagcctttaaagcttcactctaggatgagcttgcggcgcattagctagttggtggggcaatggcctaccaaggcaacgatgcgtatccgagctgagaggctgatcggacacactgggactgagacacggcccagactcctacgggagacagcagttaggaatattcgtcaatggaggaaactctgaacgagcaatgccgcgtgagtgatgaaggtcttatagatcgtaaaactctgttgtaaggaacgaaaccacgatat

SEQ ID NO: 7455 - DNA, 490 bp, unidentified
  misc_feature 1..490: note = Ascusbbf_1378037, encodes 16S rRNA
  source 1..490: mol_type = genomic DNA
agagtttgatcctggctcaggacgaacgctggcggcgtgcctaacacatgcaagtcgaacgaagcactggaaatgattccttcgggttgattttcctttgactgagtggcggacgggtgagtaacacgtgagcaacctgcctttcagagcgggatagcagttggaaacgactgataataccgcatgacatgtctcttccgcatgagagagacatcaaatgatttttcgctgaaagatgggctcgcctccgattaggtagttggtgacgcaacggctcaccaagacgactatcggtagccggaactgagaggtggatcggcaaaattgggactgagtcacgggccagactccgccgggaggcagcagtgggggatattgcacaatgggcgcaagcctgatgcagcaacgccgcgtgagggaggacggtcttcggattgtaaacctctgtcattggggaagaaacaaatgacggtacccttggaggaagcca

SEQ ID NO: 7456 - DNA, 490 bp, unidentified
  misc_feature 1..490: note = Ascusbbf_285932, encodes 16S rRNA
  source 1..490: mol_type = genomic DNA
agagtttgatcatggctcaggacgaacgctggcggcgtgcctaatacatgcaagtcgagcggacttgatgagaagcttgcttctctgagagttagcggcggacgggtgagtaacacgtaggcaacctgcctgtaagactgggataactaccggaaacggtagctaataccggataggtgattttctcgcatgagggaatcaagaaagacggagcaatctgtcacttacggatgggcctgcggcgcattagctagttggtgaggtaatggctcaccaaggcgacgatgcgtagccgacctgggagggtgaacggccacactgggactgagacacggcccagactcctacgggaggcagcagtagggaatcttccgcaatggacgaaagtctgacggagcaacgccgcgtgagtgatgaaggttttcggatcgtaaagctctgttgccagggaagaacgtcttagagagtaactgctctaagagtgacggta

SEQ ID NO: 7457 - DNA, 490 bp, unidentified
  misc_feature 1..490: note = Ascusbbf_876044, encodes 16S rRNA
  source 1..490: mol_type = genomic DNA
agagtttgatcctggctcaggatgaacgctagcgacaggcctaacacatgcaagtcgaatggaagagcttgcttttccatggcgaacgggtgagtaacacgtaggtaacctaccttaaggacgaggataacctttggaaacgaaggataatactggataggacattataaagcacatgcttaaatgtttaaaggagcaatccaccataagaggggcctgcggcgcattagctagttggtgagataaaggcccaccaaggcgatgatgcgtagctggactgagaggttgaacagccacaatgggactgagaacggcccatactcctacgggaggcagcagtagggaattttcggcaatgggcaaaagcctgaccgagcaatgccgcgtgatcgaagaagtatttcggtatgtaaagatcttttatcagggaagaaaaaacaaattgactgaacctgatgaataagctccggctaactacgtgccagcagcc

SEQ ID NO: 7458 - DNA, 490 bp, unidentified
  misc_feature 1..490: note = Ascusbbf_31389, encodes 16S rRNA
  source 1..490: mol_type = genomic DNA
agagtttgatcatggctcaggatgaacgctggcggcgtgcttaacacatgcaagtcgaacgattaacccgccttcgggcggtcatagagtggcgaacgggtgagtaacacgtgaccgacctgccccatacaccgggacaaccgctggaaacggcggctaataccggatactccgcggatgccgcatggcgtgcgcgggaaagctccggcggtatgggatggggtcgcggcccatcaggtagacggcggggcaacggcccaccgtgccgacgacgggtagccgggttgagagaccgaccggccacattgggactgagatacggcccagactcctacgggaggcagcagtggggaattttgcgcaatgggggaaaccctgacgcagcaacgccgcgtgcgggacgaaggccttcgggttgtaaaccgctttcagcagggaagacatcgacggtacctgcagaagaagccccggctaaatacgtgccagcagc

SEQ ID NO: 7459 - DNA, 490 bp, unidentified
  misc_feature 1..490: note = Ascusbbf_177985, encodes 16S rRNA
  source 1..490: mol_type = genomic DNA
agagtttgatcatggctcaggatgaacgctggcggcgtgcttaacacatgcaagtcgaacgaagcatgagtgaagagtaatcagatctcatgacttagtggcggacgggtgagtaacgcgtgggtaacctacctcacacagggggataacagttggaaacgactgctaaaaccgcataacatggcgataccgcatgacattgccatcaaatatttataggtgtgagatgggcccgcgtctgattagctagttggtgaggtaaaggcccaccaaggcgacgatcagtagccggcttgagagagtgaacggccacattgggactgagacacggcccaaactcctacgggaggcagcagtgggggatattggacaatgggggaaaccctgatccagcgacgccgcgtgagtgaagaagtatttcggtatgtaaagctctatcagcagggaagaaaaagcgcaagcattgactgtacctgactaagaagccccg

SEQ ID NO: 7460 - DNA, 490 bp, unidentified
  misc_feature 1..490: note = Ascusbbf_132670, encodes 16S rRNA
  source 1..490: mol_type = genomic DNA
agagtttgatcatggctcaggatgaacgctggcggcgtgcctaatacatgcaagtcgaacgaagtacttcggtacttagtggcgaacgggtgagtaacacgtaggcaacctgcccatatgactgggataacagttggaaacgactgctaataccggataggtaagcgtatggcatcataagcttattaaagttgagatacacatatggatggacctgcggtgcattagttagttggtgaggtaacggcccaccaagacgatgatgcatagccgacctgagagggtgaccggccacactgggactgagacacggcccagactcctacgggaggcagcagtagggaattttcggcaatgggggcaaccctgaccgagcaacgccgcgtgagtgaagacggtcttcggattgtaaagctctgttgtaagggaagaatgttagtgatagtatcattaagtgacggtaccttaccagaaagtcacggctaactac

SEQ ID NO: 7461 - DNA, 490 bp, unidentified
  misc_feature 1..490: note = Ascusbbf_711960, encodes 16S rRNA
  source 1..490: mol_type = genomic DNA
agagtttgatcatggctcaggatgaacgctggcggcgtgcctaacacatgcaagtcgaacggagatatcgcagcgagaggattcgtctgatcaagtggtatcttagtggcggacgggtgagtaacgcgtggagaacctgcctctttccgggggatagcagttggaaacgactggtaataccgcatgagcgcacggtaccgcatggtatagtgtgaaaagatttatcggggagagatggctccgcgtctgattagccagttggcggggtaacggcccaccaaagcgacgatcagtagccggcctgagagggcggacggccacattgggactgagacacggcccagactcctacgggaggcagcagtgggggatattgcacaatggggggaaccctgatgcagcgacgccgcgtgagtgaagaagtgtttcgacatgtaaagctctatcagcagggaagaaaggccctttaagggagatgacggtacctgac

SEQ ID NO: 7462 - DNA, 490 bp, unidentified
  misc_feature 1..490: note = Ascusbbf_532280, encodes 16S rRNA
  source 1..490: mol_type = genomic DNA
agagtttgatcctggctcaggacgaacgctggcggcgtgcttaacacatgcaagtcgaacgaggttaagttgggagcttgctcttggcttaaccgagtggcggacgggtgagtaacgcgtgaggaacctgtctcacacaggggaataacgcatcgaaagatgtgctaataccgcatatgaccacagggtcgcatggcccaggggtgaaaggagcaatccggtgtgaggtggactcgcgtctgattagatagttggtgaggtaacggcccaccaagtcaacgatcagtagccgacctgagagggtgatcggccacagagggactgagacacggcccagactcctacgggaggcagcagtggggaatattgggcaatgggcgcaagcctgacccagcaacgccgcgtgaaggaagaaggttttcggatcgtaaacttctgtcctacatgaagagatagagacggtagtgtaggaggaagccccggctaacta

SEQ ID NO: 7463 - DNA, 490 bp, unidentified
  misc_feature 1..490: note = Ascusbbf_675430, encodes 16S rRNA
  source 1..490: mol_type = genomic DNA
agagtttgatcctggctcaggatgaacgctggcggcgtgcttaacacatgcaagtcgaacgagaaagcaccctcgggtgcgagtagagtggcgaacgggtgagtaacacgtgagcaacctgccccccgcaccgggataaccgggcgaaagcccggctaataccggatgcacccggcaccgcgcatgcggggccggggaaagccctggcggcgggggatgggctcgcggcccattaggtagacggcggggtagcggcccaccgtgcccgcgatgggtagccgggttgagagaccgaccggccacattgggactgagacacggcccagactcctacgggaggcagcagtggggaattttgcgcaatgggggaaaccctgacgcagcaacgccgcgtgcgggatggaggccttcgggttgtaaaccgctttcagcagggaagacactgacggtacctgcagaagaagctccggctaactacgtgccagcagcc

SEQ ID NO: 7464 - DNA, 490 bp, unidentified
  misc_feature 1..490: note = Ascusbbf_9176, encodes 16S rRNA
  source 1..490: mol_type = genomic DNA
agagtttgatcctggctcaggacgaacgctggcggcgtgcctaacacatgcaagtcgaacggagatatatcgaatgaagatttcggttggaatttgatatatcttagtggcggacgggtgagtaacgcgtgagtaacctgccgatgagagtggaataacgttctgaaaagaacgctaataccgcataacgtatcgaagccgcatgactttgataccaaagattttatcgctcatcgatggactcgcgtccgattagccagttggcggggtaacggcccaccaaagctacgatcggtagccggactgagaggttgaacggccacattgggactgagacacggcccagactcctacgggaggcagcagtgggggatattgcgcaatgggggaaaccctgacgcagcaacgccgcgtgaaggatgacggtcttcggattgtaaacttcttttgttgaggacgaagaaagtgacggtactcaacgaataagctc

SEQ ID NO: 7465 - DNA, 490 bp, unidentified
  misc_feature 1..490: note = Ascusbbf_3054, encodes 16S rRNA
  source 1..490: mol_type = genomic DNA
agagtttgatcatggctcaggactaacgctggcggtgcgcctaacacatgcaagtcgtacgggctccttcgggagctagtggcagacgggtgagtaacgcgtaggtaatgtacctcttcgctggggatacctacctgaaaaggtggctaaaaccgaatgagcttttcaagcggcatcgcttgatttgcaaacctccggggcgaagagatcagcttgcgtactatcagctagtaggtgaggtaatggcttacctaggcttcgacggttagccggtctgagaggatgatcggccacattggaactgaaacacggtccagactcctacgggaggcagcagtgaggaatcttgcgcaatgggcgaaagcctgacgcagcgacaccgcgtgagggatgaaggtcttcggattgtaaacctttgtcagtggggacgagaacggacggtacccgctgaggaagcatcggcttactacgtgccagcagccgcggtaat

SEQ ID NO: 7466 - DNA, 490 bp, unidentified
  misc_feature 1..490: note = Ascusbbf_7363, encodes 16S rRNA
  source 1..490: mol_type = genomic DNA
agagtttgatcatggctcaggatgaacgctagctacaggcttaacacatgcaagtcgagcggaatggcttcggccatttagcggcagacgggtgagtaacacgtatccaacctttcccttactcgggtatagcctcgggaaactgagagtaatccccgatgaagtgtacgaggagcattttttgcacaccaaagatttatcggtgaggggtggggatgcgttccattagttagtaggcggggcaacggcccacctagacgatgatggataggggttctgagaggaaggtcccccacattggaactgcgacacggtccaaactcctacgggaggcagcagtgaggaatattggtcaatggtcggaagactgaaccagccaagtagcgtgcaggatgacggccctatgggttgtaaactgcttttgtgcgggaataacggtctcctcgtgaggggatgtgcatgtaccgtacgaataaggatcggctaactc

SEQ ID NO: 7467 - DNA, 490 bp, unidentified
  misc_feature 1..490: note = Ascusbbf_96955, encodes 16S rRNA
  source 1..490: mol_type = genomic DNA
agagtttgatcatggctcaggatgaacgctggcggcgtgcataacacattcaagtcgaacggtgaagtcccttcgggggcggaacagtggcggacgggtgagtaacgcgtgagcaacctgccgtatagtgggggataacacagggaaacttgtgctaataccgcatgacacaaggggatcgcatggtttccttgtcaaagatttattgctgtacgatgggctcgcgtatgattagacagttggcagggtaacggcctaccaaatcaacgatcattagccgaactgagaggttgaacggccacattggaactgagaaacggtccagactcctacgggaggcagcagtggggaatattgggcaatgggcgaaagcctgacccagcgacgccgcgtgagggaagaaggtcttcggattgtaaacctctttcagcagggaagaaaagatgacggtacctgcagaagaagtcacggctaactacgtgccagcagc

SEQ ID NO: 7468 - DNA, 490 bp, unidentified
  misc_feature 1..490: note = Ascusbbf_193349, encodes 16S rRNA
  source 1..490: mol_type = genomic DNA
agagtttgatcctggctcaggacgaacgctggcggcgtgcctaatacatgcaagtcgcacgaacggcgacggaacttgttccgtcaaagttagtggcgcacgggtgagtaacacgtggagaacctacctttcagcgggggataaccattggaaacgatgactaataccgcataggacatctggtcacatgaccgggtgaggaaagacggcttcggctgtcactgaaagatggctccgcggagcattagctagatggtaaggtaacggcttaccatggccatgatgcatagccgacctgagagggtgatcggccacactgggactgagacacggcccagactcctacgggaggcagcagtagggaatcttccgcaatggacgcaagtctgacggagcaacgccgcgtgtgtgaagaaggtcttcggatcgtaaagcactgttgttagagaagaacacccggtagagtaactgctaccggcttgacggtatc

SEQ ID NO: 7469 - DNA, 490 bp, unidentified
  misc_feature 1..490: note = Ascusbbf_6916, encodes 16S rRNA
  source 1..490: mol_type = genomic DNA
agagtttgatcctggctcaggatgaacgctggcggcgtgcctaacacatgcaagtcgaacgaataacccgccttcgggcggtcatagagtggcgaacgggtgagtaacacgtgaccaaccttccccccgcatggggataaccgggcgaaagcccggctaatacccaatactccgggccctccgcatggaggggccgggaaagcccaggcggcgggggatggggtcgcggcccattaggtagacggcggggtaacggcccaccgtgcccgcgatgggtagccggactgagaggtcgatcggccacattgggactgagatacggcccagactcctacgggaggcagcagtggggaattttgcgcaatgggggaaaccctgacgcagcaacgccgcgtgcgggatgaaggccctagggttgtaaaccgctttcagcagggaagaaacatgacggtacctgcagaagaagctccggctaactacgtgccagcag

SEQ ID NO: 7470 - DNA, 490 bp, unidentified
  misc_feature 1..490: note = Ascusbbf_9348, encodes 16S rRNA
  source 1..490: mol_type = genomic DNA
agagtttgatcatggctcaggacgaacgctggcggcgtgcctaacacatgcaagtcgagcggagccaattaacagatcctttcggggtgacgttgaggaagcttagcggcggacgggtgagtaacgtgtgagtaacctgcctgtaagagggggataacacagagaaatttgtgctaataccgcatattgagcaattatcgcatggtaaatgcttgaaagatttatcgcttacagatggactcgcatctgattagctagttggcgaggtaacggctcaccaaggcgacgatcagtagccgaactgagaggttgatcggccacattgggactgagacacggcccagactcctacgggaggcagcagtgggggatattgcgcaatgggggcaaccctgacgcagcaacgccgcgtgatggaagaaggccttcgggttgtaaacatctgttgcaagggaagaaacaaatgacggtaccttgtgaggaagccacg

SEQ ID NO: 7471 - DNA, 488 bp, unidentified
  misc_feature 1..488: note = Ascusbbf_30539, encodes 16S rRNA
  source 1..488: mol_type = genomic DNA
agagtttgatcctggctcagaacgaacgctggcggcatggattaggcatgcaagtcgaacgaagcagcaatgcttagtggcggaagggtgaggaacgcgtgagtaatctgccctcaagttgggaataacagctggaaacggctgctaataccgaatgtggctgttgggtcgcatgatctgacagttaaagatttattgcttgaggatgagctcgcgtcccattagctagttggcggggcaacggcccaccaaggcgatgatgggtagctggtctgagaggatggtcagccacactgggactgagacactgcccagactcctacgggaggctgcagtcgagaatcttgggcaatgcgcgaaagcgtgacccagcaatgccgcgtgcgtgatgaaggtcttcggatcgtaaagcgctgtcaaccgggacgaaagatgacggtaccggtgaaggaagccacggctaactacgtgccagcagccgcggtaat

SEQ ID NO: 7472 - DNA, 490 bp, unidentified
  misc_feature 1..490: note = Ascusbbf_5753, encodes 16S rRNA
  source 1..490: mol_type = genomic DNA
agagtttgatcatggctcaggacgaacgctggcggcatgcctaacacatgcaagtcgaacggagttaaaggagcttgcttctttaacttagtggcggacgggtgagtaacgcgtgagcaacctgcctctaagtggggaataatgtactgaaaaggacactaataccgcataacatacagataccgcatgatatttgtatcaaagatttatcgcttagagatgggctcgcgtccgattagccggttggtggggtaacggcctaccaaagctacgatcggtagccggactgagaggttgaacggccacattgggactgagacacggcccagactcctacgggaggcagcagtgggggatattgcgcaatgggggaaaccctgacgcagcaatgccgcgtgaaggatgaaggtcttcggattgtaaacttcttttgttggggatgaaaaatgacggtacccaacgaataagctccggctaactacgtgccagc

SEQ ID NO: 7473 - DNA, 490 bp, unidentified
  misc_feature 1..490: note = Ascusbbf_14917, encodes 16S rRNA
  source 1..490: mol_type = genomic DNA
agagtttgatcatggctcagattgaacgctagcgggatgctttacacatgcaagtcgaacggcagcgcgggctttcgggcctggcggcgagtggcgaacgggtgagtaatgtatcggaacgtgcccagtagcgggggataactactcgaaagagtggctaataccgcatacgccctacgggggaaagggggggattcttcggaacctctcactattggagcggccgatatcggattagctagttggtggggtaaaggcctaccaaggcgtcgatccgtagctggtttgagaggacgaccagccacactgggactgagacacggcccagactcctacgggaggcagcagtggggaattttggacaatgggggcaaccctgatccagccatcccgcgtgtgcgatgaaggccttcgggttgtaaagcacttttggcagggaagaaaaggctctggttaatacctggagctgctgacggtacctgcagaataa

SEQ ID NO: 7474 - DNA, 484 bp, unidentified
  misc_feature 1..484: note = Ascusbbf_94282, encodes 16S rRNA
  source 1..484: mol_type = genomic DNA
agagtttgatcctggctcagaacgaacgctggcggcaggtcttaggcatgcaagtcgaacggatgacagagagcttgctctctgaagtcagtggcgcacgagtgagtaacgcgtgggaaactgcccttcactggggaataacgtttggaaacgaacgctaataccgcatacgcccgcaaggggaaagatttatcggtgatggatgtgcccgcgttggattagccagttggtggggtaatggcctaccaaagcaatgatccatagctggtctgagaggacgatcagccacgctggaactgagacacggtccagactcctacgggaggcagcagctaagaatattggtcaatgggggaaaccctgaaccagccatgccgcgtgaatgaagaaggccttcgggttgtaaagttcttttagtcgtgaagatgatgacagtagcgacagaaaaagcaccggctaacttcgtgccagcagccgcggtaat

SEQ ID NO: 7475 - DNA, 490 bp, unidentified
  misc_feature 1..490: note = Ascusbbf_21924, encodes 16S rRNA
  source 1..490: mol_type = genomic DNA
agagtttgatcctggctcaggacgaacgctggcggcgtgcttaacacatgcaagtcgagcggtaaggcccttcggggtacacgagcggcgaacgggtgagtaacacgtgagtaatctgcccttcacttcgggataactaccggaaacggtggctaataccggatatgactcccttctgcatggttgggggtggaaagttctggcggtgaaggatgtgctcgcggcctatcagcttgttggtgaggtaatggctcaccaaggcttcgacgggtagccggcctgagagggtgaccggccacactgggactgagacacggcccagactcctacgggaggcagcagtggggaatattggacaatgggcgaaagcctgatccagcaacgccgcgtgagggatgactgccttcgggttgtaaacctctttcagtaccgacgaagcgagagtgacggtaggtacagaagaagcaccggccaactacgtgccagcagc

SEQ ID NO: 7476 - DNA, 490 bp, unidentified
  misc_feature 1..490: note = Ascusbbf_51718, encodes 16S rRNA
  source 1..490: mol_type = genomic DNA
agagtttgatcatggctcagaacgaacgttagcggcgcgcttaacacatgcaagtcgagcgagaaagggcttcggccccggtaaagcggcgcacgggtgagtaacacgtaggtaatctgccctcgagtggtggataactccccgaaaggggagctaatacagcatgagaccacgactctccggagttggggtcaaagcgggcctctccatggaagctcgtgcttgaggatgagcctgcggcccatcagcttgttggtggtgtaaaagacccccaaggctaagacgggtagctggtctgagaggatgaacagccacactggaactgagacacggtccagactcctacgggaggcagcagtggggaatcttgcgcaatgggcgaaagcctgacgcagcgacgccgcgtgagcgatgaaggccttcgggttgtaaagctctgtggagagggacgaataagggctggcgaatacccagtctgatgacggtacct

SEQ ID NO: 7477 - DNA, 490 bp, unidentified
  misc_feature 1..490: note = Ascusbbf_41961, encodes 16S rRNA
  source 1..490: mol_type = genomic DNA
agagtttgatcatggctcaggacgaacgctggcggcgtgcttaacacatgcaagtcgaacggagacggtggagagcttgctcgaagctgtcttagtggcggacgggtgagtaacgcgtgaacaatctgtctcacacagggggataacgcatcgaaagatgtgctaataccgcgtaggaccacggggtcgcatgatcctgaggtgaaaggagaaatccggtgtgaggtgagttcgcgtctgattagatagttggtgaggtaacggcccaccaagtcaacgatcagtagccgacctgagagggtgatcggccacattgggactgagacacggcccagactcctacgggaggcagcagtggggaatattgggcaatgggcgaaagcctgacccagcaacgccgcgtgaaggaagaaggttttcggatcgtaaacttctgtccttggtgaagataatgacggtagccaaggaggaagccccggctaactacgtg

SEQ ID NO: 7478 - DNA, 490 bp, unidentified
  misc_feature 1..490: note = Ascusbbf_156304, encodes 16S rRNA
  source 1..490: mol_type = genomic DNA
agagtttgatcctggctcaggatgaacgctggcggcgcgcttaacacatgcaagtcgaacggaatttgtaacttcggttgtggattcagtggcggacgggtgagtaacacgtggataacttgccttttagtgggggatagctgagagaaatctcaattaataccgcataatgtaatttgttcgcatgaatagattaataaagatgaaaatcgctaagagataggtctgcgtctgattagctagttggagtggtgatggcacaccaaggcgacgatcagtaaccggtttgagagaatgaacggtaacattgggactgagatacggcccagactcctacgggaggcagcagtggggaatattgcgcaatggaggaaactctgacgcagcgacgccgtgtgaaggatgaaggccttcgggttgtaaacttttatcgattgtgaaaagaatggatggtagcaaagtaagaagctccggctaattacgtgccagc

SEQ ID NO: 7479 - DNA, 490 bp, unidentified
  misc_feature 1..490: note = Ascusbbf_31105, encodes 16S rRNA
  source 1..490: mol_type = genomic DNA
agagtttgatcctggctcaggatcaacgctggcggcgtgcctaatgcatgcaagtcgaacggggtcgccttcgggcggctcacgtggcggacgggtgaggaacacgtgggcgatctgccccgaggtgggggatagccaccagaaatggtgggtaaaaccgcatgagctcgccgggttgcgacctggtgaggaaagcccttcggggtgccttgggaggagcctgcggcggattagctagttggtggggtaacggcgtaccaaggcgatgatccgtagctggtctgagaggatgaccagccacaggggaactgagacacggtccccactcctacgggaggcagcagcaaggaattttccgcaatgggcgaaagcctgacggagcaacgccgcgtgggggatgacgcttttcggagtgtaaaccccttttctcagggaagaacacaatgacggtacctgaggaataaggaccggctaactacgtgccagcagc

SEQ ID NO: 7480 - DNA, 490 bp, unidentified
  misc_feature 1..490: note = Ascusbbf_67680, encodes 16S rRNA
  source 1..490: mol_type = genomic DNA
agagtttgatcatggctcaggatgaacgctggcggcgtgcttaacacatgcaagtcgaacggagatgcgtgatagaagttttcggatggaaatcacacatcttagtggcggacgggtgagtaacacgtaaataatctgccttcaagagtgggataacagatagaaatatttgctaataccgcataagaccacaggttcgcatgaactaggggtaaaaggagcaatccgcttgaagatgagtttgcggactattagctagttggtagggtaaaggcctaccaaggctgagatggatagccgacctgagagggtgaacggccacactggaactgagatacggtccagactcctacgggaggcagcagtgaggaatattgggcaatggaggaaactctgacccagcaacgccgcgtgaaggaagaaggttttcggattgtaaacttctgttatggaggaaaaaggaagtgatggtactccatgagcaagctac

SEQ ID NO: 7481 - DNA, 470 bp, unidentified
  misc_feature 1..470: note = Ascusbbf_17274, encodes 16S rRNA
  source 1..470: mol_type = genomic DNA
agagtttgatcatggctcagaacgaacgctggcggcaggcttaacacatgcaagtcgaacgatgtcttcggacatagtggcagacgggtgagtaacacgtgggaacgtaccttccagtcgggaataactcagggaaacttgagctaataccggatacgcccttttggggaaagatttatcgctggaagatcggcccgcgtctgattagctagttggtggggtaatggcctaccaaggcgacgatcagtagctggtctgagaggatgatcagccacactgggactgagacacggcccagactcctacgggaggcagcagtggggaatattggacaatgggcgcaagcctgatccagccatgccgcgtgagtgatgacggccttagggttgtaaagctctttcgctcgcgacgataatgacggtagcgagagaagaagccccggctaacttcgtgccagcagccgcggtaat

SEQ ID NO: 7482 - DNA, 490 bp, unidentified
  misc_feature 1..490: note = Ascusbbf_1824631, encodes 16S rRNA
  source 1..490: mol_type = genomic DNA
agagtttgatcatggctcaggatgaacgctggcggcgtgcttaacacatgcaagtcgaacggagttaagagaagcttgcttttcttaacttagtggcggacgggtgagtaacgcgtgagcaatctgcctttcagtggggaataatgttctgaaaagagcactaataccgcataaagtatcgttgccgcatgacgatggtaccaaagatttatcgctgagagatgagctcgcgtccgattagccagttggtggggtaacggcctaccaaagcgacgatcggtagccggactgagaggttgaacggccacattgggactgagacacggcccggactcctacgggaggcagcagtgggggatattgcgcaatgggggaaaccctgacgcagcaatgccgcgtgaaggatgaaggtcttcggattgtaaacttcttttgtcagggacgaacaatgacggtacctgacgaataagctccggctaactacgtgcca

SEQ ID NO: 7483 - DNA, 472 bp, unidentified
  misc_feature 1..472: note = Ascusbbf_29334, encodes 16S rRNA
  source 1..472: mol_type = genomic DNA
agagtttgatcatggctcagaacgaacgctggcggcaggcctaaaacatgcaagttgaacggttacagcaatgtagcagtagcggacgggtgaggaacatatgggaacatgccttttggtgtggaataacatctggaaacgggtgataataccgcataagccctttgggggaaagatttatcgccggaagagtggcccatatcagattagctagttggttaggtaacggctgaccaaggcgacgatctgtagccggtttgagaggatgatcggccacactgggactgagacacggcccagactcctacgggaggcagcagttaggaatattggacaatgggggaaaccttgatccagccatgccgcgtgagtgaagaaggccttcgggttgtaaagctcttttgtatgggaaaatgatgatggtaccataagaataagcaccggcaaacttcgtgccagcagccgcggtaat

SEQ ID NO: 7484 - DNA, 490 bp, unidentified
  misc_feature 1..490: note = Ascusbbf_61427, encodes 16S rRNA
  source 1..490: mol_type = genomic DNA
agagtttgatcatggctcaggatgaacgctggcggcatgcctaacacatgcaagtcgaacggagttgaggagtagcttgctatgaatcaacttagtggcggacgggtgagtaacgcgtgagtaacctgcctcttagagggggataacgttctgaaaaggacgctaataccgcatataattacgaaatcgcatggttttgtaatgaaaggagcaatccgctaagagatggactcgcgtctgattagctagatggtggggtaacggctcaccatggcgacgatcagtagccggactgagaggttgaacggccacattgggactgagacacggcccagactcctacgggaggcagcagtgggggatattacgcaatgggggaaaccctgacgtagcaatgccgcgtgaaggaagaaggttttcggattgtaaacttcttttgtcagggacgataatgacggtacctgacgaataagctccggctaactatgtg

SEQ ID NO: 7485 - DNA, 490 bp, unidentified
  misc_feature 1..490: note = Ascusbbf_154589, encodes 16S rRNA
  source 1..490: mol_type = genomic DNA
agagtttgatcatggctcagattgaacgctggcggcgtgcttaacacatgcaagtcgaacgcgaaaggggcttcggtcccgagtagagtggcgcacgggtgagtaacgcgtggatgatctgcccctgcagctggaatagcgactggaaacggtcgataataccggatacgcccttgttgaacgatgaggggaaaggagacctctgcttgcaagtttccgtgcagggatgagtccgcgtcccattagcttgttggcggggtaacggcccaccaaggcgacgatgggtagccgatttgagaggatgatcggccacattggaactgaaacacggtccaaactcctacgggaggcagcagtggggaatattgcgcaatgggcgaaagcctgacgcagcgacgccgcgtgagggatgaaggtcttcggatcgtaaacctctgtcggaagggaaaaaggtgcagggtgccaatcagccctgcattgatggtacctt

SEQ ID NO: 7486 - DNA, 490 bp, unidentified
  misc_feature 1..490: note = Ascusbbf_57807, encodes 16S rRNA
  source 1..490: mol_type = genomic DNA
agagtttgatcatggctcaggacgaacgctggcggcatgcctaacacatgcaagtcgaacggagccaaccggacaatcccttcggggtgcgactggggaagcttagtggcggacgggtgagtaacgcgtgagtaacctgccttcaagaggggaataacacatcgaaaggtgtgctaataccgcataacgcatatttgccgcatgacagatatgccaaagatttatcgcttgaagatggactcgcgtctgattagctagttggtgaggtaacggctcaccaaggcgacgatcagtagccgaactgagaggttgatcggccacattgggactgagacacggcccagactcctacgggaggcagcagtgggggatattgcgcaatgggggcaaccctgacgcagcaatgccgcgtgaaggatgaaggtcttcggatcgtaaacttttgtcttatgggaagaataatgacggtaccataggaggaagccacggc

SEQ ID NO: 7487 - DNA, 490 bp, unidentified
  misc_feature 1..490: note = Ascusbbf_73665, encodes 16S rRNA
  source 1..490: mol_type = genomic DNA
agagtttgatcatggctcaggatgaacgctagctacaggcttaacacatgcaagtcgaggggcagcgggagagtagcttgctactcttgccggcgaccggcgaatgggtgagtaacgcgtatccaacctgccacatgcccgggaatagcccttggaaatgaggattaagtcccgatatgcttatttgtcgcatgacatgtaagtgaaacaggcatgtgatggggatgcgtccgattagcttgccggcggggtaacggcccaccggggcttcgatcggtaggggttctgagaggaaggtcccccacactggtactgagacacggaccagactcctacgggaggcagcagtgaggaatattggtcaatgggcgagagcctgaaccagccaagtagcgtgcaggatgacggccctacgggttgtaaactgctttttccggggaataaccggcgtcacgtgtggcgccctgcatgtacccggtgaataaggacc

SEQ ID NO: 7488 - DNA, 486 bp, unidentified
  misc_feature 1..486: note = Ascusbbf_37006, encodes 16S rRNA
  source 1..486: mol_type = genomic DNA
agagtttgatcatggctcagaacgaacgctggcggcaggcttaacacatgcaagtcgaacggaacatattgtgcttgcacagtatgtcagtggcgcacgggtgagtaacgcgtgggaagatgtcttattgacggggatagcctctggaaacggagggtaatacccgataagccctgagggggaaaggaagaaatttgcgataagagttgcccgcgtctgattaggcagttggtggggtaacggcctaccaaaccgacgatcagtagccggtctgagaggatgatcggccacattgggactgagacacggcccaaactcctacgggaggcagcagtggggaatattggacaatggggggaaccctgatccagccatgccgcgtgagtgatgacggccttcgggttgtaaagctcttttaggcgagacgataatgacggtatcgccagaataagcaccggctaacttcgtgccagcagccgcggtaat

SEQ ID NO: 7489 - DNA, 490 bp, unidentified
  misc_feature 1..490: note = Ascusbbf_112536, encodes 16S rRNA
  source 1..490: mol_type = genomic DNA
agagtttgatcctggctcaggatgaacgctggcggcaggcttaatacatgcaagtcggacggtaacgcgccggtagcaataccggtggcgacgagtggcgcacgggtgcgtaacgcgtatgcaacctacccataacagggacaaaacgttgagaaatcggcgctaatatcccatgtggatgactccgggcatccggagtcatttaaaggcgcgagctggttatggatgggcatgcgtatcattagctggttggcggggtgacggcccaccaaggcgacgatgattaggggttctgagaggatggtcccccacactggaactgagacacggtccagactcctacgggaggcagcagtagggaatattgggcaatggtcggaagactgacccagccatgccgcgtgaaggaatacggccctatgggtcttaaacttcttttatcgcagagtaaccgcggggacgcgtccctgcctgcaagtatgcgatgaat

SEQ ID NO: 7490 - DNA, 490 bp, unidentified
  misc_feature 1..490: note = Ascusbbf_286251, encodes 16S rRNA
  source 1..490: mol_type = genomic DNA
agagtttgatcctggctcaggatgaacgctggcggcatgcctaagacatgcaagtcgtacgaggtggccctttgaactctgtacttgtatagagcgatttggatctccacctagtggcgaaagggtgagtaacacgtgggttatctacctcagagactgggataactactggaaacggtagctaataccggatgatatatacaatgatacgttattgtatagtaaaaggtgcctttaaagcattactttgagatgagcctgcgctgtattagctagttggtaaggtaacggcttaccaaggcgacgatgcatagccgacctgagagggtgatcggccacactgggactgagacacggcccagactcctacgggagacagcagttagggatattcgtcaatggaggaaactctgaacgagcaatgccgcgtgagtgatgacagttctttggattgtaaaactctgttgttagggaagaacgacctatatag

SEQ ID NO: 7491 - DNA, 490 bp, unidentified
  misc_feature 1..490: note = Ascusbbf_99899, encodes 16S rRNA
  source 1..490: mol_type = genomic DNA
agagtttgatcatggctcagaacgaacgctggcggcgcgtcttaagcatgcaagtcgagcgggaatagaggtgcttgcacttctatgagagcggcggactggtgagtaacacgtaggcaacgtacccttcggacggggatagccggcagaaatgtcgggtaataccggatgtgaacatgagccgtaaaggttcatgtggaaaggagcttcggctccgccggaggagcggcctgcggcccatcagcttgttggcggggtaaaggcccaccaaggcgatgacgggtatccggcctgagagggtgaacgggcacattgggactgagatacggcccagactcctacgggaggcagcagctaagaatattccgcaatgggggaaaccctgacggagcgacgccgcgtggacgatgaaggccggaaggttgtaaagtcctttagtctgtgaggaataaggagcggagggaatgccgttccggtgactgtagcagga

SEQ ID NO: 7492 - DNA, 490 bp, unidentified
  misc_feature 1..490: note = Ascusbbf_217427, encodes 16S rRNA
  source 1..490: mol_type = genomic DNA
agagtttgatcatggctcagaacgaacgctggcggcgcgtcttaagcatgcaagtcgagcggcaagaaggtgcttgcatcttcctagagcggcggactggtgagtaacacgtaggtgacgcaccctccggacggggatagcctgtggaaacacagggtaataccggatacggttccgtaagctggagttacggaaggaaaggagcctcggctccgccggaggagcggcctgcggcccatcagctggttggcggggtaacggcccaccaaggctacgacgggtatccggcctgagagggtgagcgggcacattgggactgagatacggcccagactcctacgggaggcagcagctaagaatattccgcaatgcgcgaaagcgtgacggagcgacgccgcgtggacgatgaaggccggaaggttgcagagtcctttggcgcccgaggaaagaacgcggcagggaatggccgcggattgactgtagggcgaga

SEQ ID NO: 7493 - DNA, 490 bp, unidentified
  misc_feature 1..490: note = Ascusbbf_76074, encodes 16S rRNA
  source 1..490: mol_type = genomic DNA
agagtttgatcatggctcaggatgaacgctggcggcgtgcctaacacatgcaagtcgaacggagatattacggatgagggattcgtctggattctgttttatcttagtggcggacgggtgagtaacgcgtggagaacctgcctctttccgggggatagcagttggaaacgactggtaataccgcatgagcgcacagtaccgcatggtacggggtgaaaagatttatcgggaagagatggctccgcgtctgattagccagttggcggggtaacggcccaccaaagcaacgatcagtagccggcctgagagggcggacggccacattgggactgagacacggcccagactcctacgggaggcagcagtgggggatattgcacaatggggggaaccctgatgcagcgacgccgcgtgagtgaagaagtgtttcgacatgtaaagctctatcagcagggaagaaagacccgcaagggggatgacggtacctgac

SEQ ID NO: 7494 - DNA, 490 bp, unidentified
  misc_feature 1..490: note = Ascusbbf_255979, encodes 16S rRNA
  source 1..490: mol_type = genomic DNA
agagtttgatcatggctcaggatgaacgctggcggcgtgcttaacacatgcaagtcgaacggagttaagcgctgaatgaggcttcggcggatttcttgcttaacttagtggcggacgggtgagtaacgcgtgagtaacctgccctcgagtggggaataacgttctgaaaaggacgctaataccgcataatatatgtttgtcgcatggcagacatatcaaagatttatcgctcgaggatggactcgcgtccgattagcttgttggcggggtaacggcccaccaaggcgacgatcggtagccggactgagaggttgaacggccacattgggactgagacacggcccagactcctacgggaggcagcagtgggggatattgcgcaatgggggaaaccctgacgcagcaacgccgcgtggaggatgacggttttcggattgtaaactccttttataagggacgaactaagacggtaccttatgaataagctccg

SEQ ID NO: 7495 - DNA, 490 bp, unidentified
  misc_feature 1..490: note = Ascusbbf_120371, encodes 16S rRNA
  source 1..490: mol_type = genomic DNA
agagtttgatcatggctcaggatgaacgctagcggcaggcttaacacatgcaagtcgaggggcagcgcgggtagcaatatctggcggcgaccggcgaaagggtgagtaacgcgtgagcaacatgcccgtctgagggggatagtcgatggaaacgtcgcgtaataccccgtaacataagggaccgcatgatcctttattgaaagattcatcgcagacggattggctcgcgtaccattagctagttggcggggtaacggcccaccaaggcgacgatggttaggggttctgagaggaaggtcccccacattggaactgagacacggtccagactcctacgggaggcagcagtgaggaatattggtcaatggccgagaggctgaaccagccatgccgcgtgcgggaagacggccctatgggttgtaaaccgcttttttgagggagcaataaggcccacgagtgggtcgatgagagtaccttgagaataagcatc

SEQ ID NO: 7496 - DNA, 490 bp, unidentified
  misc_feature 1..490: note = Ascusbbf_59049, encodes 16S rRNA
  source 1..490: mol_type = genomic DNA
agagtttgatcatggctcaggattaacgctggcggcgtgcctaatacatgcaagtcgaatggtagcaataccatggcgaacgggtgagtaacacgtaggtaacctgtctaaaagacgaggataaccattggaaacgatggataatactggataggacatttgaaggcatctttgaatgtttaaagatttatcactttaagaggggcctgcggcgcattagctagttggtgaggtgaaggctcaccaaggcgatgatgcgtagccggactgagaggttgaacggccacaatggaactgagaacggtccatactcctacgggaggcagcagtagggaattttcggcaatgggcgaaagcctgaccgagcaacgccgcgtgaacgaagaagtatttcggtatgtaaagttcttttattagggacgaaaaagttagaattgacggtacctaatgaataagctccggctaactacgtgccagcagccgcggtaat

SEQ ID NO: 7497 - DNA, 490 bp, unidentified
  misc_feature 1..490: note = Ascusbbf_61871, encodes 16S rRNA
  source 1..490: mol_type = genomic DNA
agagtttgatcatggctcaggacgaacgctggcggcgtgcttaacacatgcaagtcgagcggaaaggccccttcgggggtactcgagcggcgaacgggtgagtaacacgtgagcaacctgcccctgactctgggataagcctgggaaactgggtctaataccggatatgactcgcggccgcatggtctgcgggtggaaagatttattggttggggatgggctcgcggcctatcagcttgttggtggggtgatggcctaccaaggcgacgacgggtaaccggcctgagagggcgaccggtcacactgggactgagacacggcccagactcctacgggaggcagcagtgggaatattgcgcaatgggcggaagcctgacgcagcgacgccgcgtgggggatgacggccttcgggttgtaaacctctttcagcatcgacgaagcctttcggggtgacggtaggtgcagaagaagcgccggctaactacgtgcc

SEQ ID NO: 7498 - DNA, 490 bp, unidentified
  misc_feature 1..490: note = Ascusbbf_115211, encodes 16S rRNA
  source 1..490: mol_type = genomic DNA
agagtttgatcatggctcaggatgaacgctggcggcgtgcttaacacatgcaagtcgaacggactcttatcgacagaagtatttatacggacgttggtaggcgttagtggcggacgggtgagtaacgcgtgggaaacctgccctattccgggggataccagttggaaacgactgttaataccgcataagcgcacattgccgcatggcagagtgtgaaaaactccggtggaataggatggtcccgcgtctgattaggcagttggcggggtaacggcccaccaaaccgacgatcagtagccgacctgagagggtgaccggccacattgggactgagacacggcccaaactcctacgggaggcagcagtggggaatattgcacaatgggggaaaccctgatgcagcgacgccgcgtgagtgaagaagtatttcggtatgtaaagctctatcagcagggaagaagatgacggtacctgcacaagaagccccggc

SEQ ID NO: 7499 - DNA, 489 bp, unidentified
  misc_feature 1..489: note = Ascusbbf_224473, encodes 16S rRNA
  source 1..489: mol_type = genomic DNA
agagtttgatcatggctcaggacgaacgctggcggcgtgcctaatacatgcaagtcgagcgaggaacttcggttcctagcggcgaacgggtgagtaacacgtgggcaacctgccctcaagcctgggataactccgggaaaccggggctaacaccagataatcttttctttcgcatgaaagagaagtaaaagtttacacttgaggatgggcccgcgttgcattagctagttggtggggtaaaggcctaccaaggcgacgatgcatagccgacctgagagggtgaccggccacactgggactgagacacggcccagactcctacgggaggcagcagtagggaattttccgcaatgggggcaaccctgacggagcaacgccgcgtgagtgaagacggtcttcggattgtaaagctctgttcttggggaagaaaacaatgacggtacccaagcagaaagccccggctaactacgtgccagcagccgcggtaat

SEQ ID NO: 7500 - DNA, 490 bp, unidentified
  misc_feature 1..490: note = Ascusbbf_53125, encodes 16S rRNA
  source 1..490: mol_type = genomic DNA
agagtttgatcatggctcaggacgaacgctggcggcgtgcctaacacatgcaagtcgaacgggacttaattccggaagttttcggatggaaaggattaagtttagtggcggacgggtgagtaacgcgtgagtaacctgcctttcagagggggataacgtactgaaaaggacgctaataccgcataatatattgaagtcgcatgattttaatatcaaaggagcaatccgctgaaagatggactcgcgtccgattagctggttggtgagataaaggcccaccaaggcgacgatcggtagccggactgagaggttgaacggccacattgggactgagacacggcccagactcctacgggaggcagcagtgggggatattgcgcaatgggggaaaccctgacgcagcaacgccgcgtgaaggaagacggttttcggattgtaaacttcttttgtcagggacgaaaaatgacggtacctgacgaataagctccgg

SEQ ID NO: 7501 - DNA, 490 bp, unidentified
  misc_feature 1..490: note = Ascusbbf_1878586, encodes 16S rRNA
  source 1..490: mol_type = genomic DNA
agagtttgatcatggctcaggatgaacgctagcggcaggcctaatacatgcaagtcgaacggtaagcggcccttcgggaccgcgagagtggcggacgggtgcgtaacgcgtatgcaaccaacccccctcaccgggatagccggtggaaacgccggataagaccggatgcgccgcgagggaggcatctcccatgcggcaaggcggcgacgcggagggggacgggcatgcgtgccattagcttgttggcggggcgacggcccaccaaggcgacgatggctaggggatctgagaggacggtcccccacactggtactgagacacggaccagactcctgcgggaggcagcagtaagggatattggtcaatggggggaaccctgaaccagccatgccgcgtgagggaatgaggccctacgggtcgtgaacctcttttgcccggggacaacacggcgcacgtgatgcgccgacgagggtaccgggcgaataagcat

SEQ ID NO: 7502 - DNA, 488 bp, unidentified
  misc_feature 1..488: note = Ascusbbf_61601, encodes 16S rRNA
  source 1..488: mol_type = genomic DNA
agagtttgatcctggctcagaacgaacgctggcggcaggccttagatatgcaagttgaacggtctaaggtggagcttgctctactttagatagtagcggacgggtgagtaatacatgggaacgtaccctcttgtggggaatagcttttggaaacgaaaggtaataccgcataagccctacgggggaaaggagtaattcgcgagaggatcggcccatgccagattagcttgttggtgaggtaacggcttaccaaggctacgatctgtagctggtttgagaggatgatcagccacattgggactgagacacggcccaaactcctacgggaggcagcagccaggaatattggacaatgggggaaaccctgatccagccatgccgcgtgagtgaagaaggtcttcggattgtaaagctcttttgtacgggaagatgatgacggtaccgtaagaataagcaccggctaacttcgtgccagcagccgcggtaat

SEQ ID NO: 7503 - DNA, 490 bp, unidentified
  misc_feature 1..490: note = Ascusbbf_192545, encodes 16S rRNA
  source 1..490: mol_type = genomic DNA
agagtttgatcatggctcaggatgaacgctagctacaggcttaacacatgcaagtcgaggggcagcgtgtacagatgcttgcatcagtatgacggcgaccggcgcacgggtgagtaacgcgtatccaacctgccatatactcgggtatagcccggtgaaaaccgaattaacccccgatagtgtcctttgcaggcatctaattaggactaaagtttacggtatatgatggggatgcgtctgattagcttgttggcggggtaacggcccaccaaggctacgatcagtaggggttctgagaggaaggtcccccacattggtactgagacacggaccaaactcctacgggaggcagcagtgaggaatattggtcaatgggcggaagcctgaaccagccaagtagcgtgcaggatgacggccctatgggttgtaaactgcttttgtcagggaacaaagtgagggacgtgtccctttttgcgtgtacctgtcgaat

SEQ ID NO: 7504 - DNA, 490 bp, unidentified
  misc_feature 1..490: note = Ascusbbf_78853, encodes 16S rRNA
  source 1..490: mol_type = genomic DNA
agagtttgatcatggctcagaacgaacgctggcggcgcgtcttaagcatgcaagtcgaatggcaagattggtgcttgcaccgatcctagaatggcagactggtgagtaacacgtgggtgacataccctccggatggggacagctgttagaaatagcaggtaataccgaatacgcttacacaggttagagtggtgtaaggaaaggtgctttggcaccaccggaggaatggctcgcggcccattagctagttggtgaggtaacggcccaccaaggcaatgatgggtatccggcctaagagggtgaacggacacattgggactgagatacggcccagactcctacgggaggcagcagctaagaatattccgcaatggacgaaagtctgacggagcgacgccgcgtggatgatgaaggccgaaaggttgtaaaatccttttgaaccggacgaataatgagtgtagggaatgacattcaggtgacggtacggttt

SEQ ID NO: 7505 - DNA, 490 bp, unidentified
  misc_feature 1..490: note = Ascusbbf_188096, encodes 16S rRNA
  source 1..490: mol_type = genomic DNA
agagtttgatcatggctcagaacgaacgctggcggcgcgtcttaagcatgcaagtcggacggcaagattggtgcttgcactaatcctagagtggcggactggtgagtaacgcgtgggtgacgtaccctccggacggggatagcctgtggaaacacaggataataccggatacggtgtcatgtgtcagaggcatgacaggaaaggttcttttgaaccgccggaggagcggcccgcggactattagctagttggtgaggtaacggcccaccaaggcgacgatagttacccggcctaagagggtgaacgggcacattgggactgagatacggcccagactcctacgggaggcagcagctaagaatattccgcaatgggggaaaccctgacggagcgacgccgcgtggatgatgaaggccggaaggttgtaaaatccttttgggagcgaggaataaggaaagtgagagaaacgctttccggtgacggtagcttc

SEQ ID NO: 7506 - DNA, 490 bp, unidentified
  misc_feature 1..490: note = Ascusbbf_130045, encodes 16S rRNA
  source 1..490: mol_type = genomic DNA
agagtttgatcatggctcaggacgaacgctggcggcgtgcttaacacatgcaagtcgagcggaaaggcccttcggggtactcgagcggcgaacgggtgagtaacacgtgagtaacctgcccctgactctgggataagcctgggaaaccgggtctaataccggatacgacactcctccgcatggtgtgggtgtggaaagttttttcggttggggatgggctcgcggcctatcagcttgttggtggggtgatggcctaccaaggcgacgacgggtagccggcctgagagggcgaccggccacactgggactgagacacggcccagactcctacgggaggcagcagtggggaatattgcgcaatgggcggaagcctgacgcagcgacgccgcgtgggggatgacggccttcgggttgtaaacctctttcagcagggacgaagttgacgtgtacctgtagaagaagcgccggctaactacgtgccagcagccgc

SEQ ID NO: 7507 - DNA, 490 bp, unidentified
  misc_feature 1..490: note = Ascusbbf_79554, encodes 16S rRNA
  source 1..490: mol_type = genomic DNA
agagtttgatcatggctcaggacgaacgctggcggcgtgcttaacacatgcaagtcgaacgagaatctagtgaaagaggtttcggccgatggagctagaggaaagtggcggactggtgagtaacgcgtgagcaacctgcccttcagagggggacaacagttggaaacggctgctaataccgcatgaggcatatttttcgcatgggagatatgttaaagatttatcgctgagggatgggctcgcgtctgattagctagttggtggggtaatggctcaccaaggcgacgatcagtagccggactgagaggttgaccggccacattgggactgagatacggcccagactcctacgggaggcagcagtggggaatattgggcaatggacgcaagtctgacccagcaacgccgcgtgaaggaagaaggtcttcggattgtaaacttctttgacaggggaagagaaggagacggtaccctgaaaacaagccacggc

SEQ ID NO: 7508 - DNA, 490 bp, unidentified
  misc_feature 1..490: note = Ascusbbf_429794, encodes 16S rRNA
  source 1..490: mol_type = genomic DNA
agagtttgatcatggctcaggatgaacgctggcggcgtgcctaacacatgcaagtcgaacgaagcatgtttgaagtaagttttcggacgagcggaagacatgactgagtggcggacgggtgagtaacgcgtgggtaacctgccccatacagggggacaacagagggaaacttctgctaataccgcataagcgcacggatctgcatggatctgtgtgaaaagctgaggcggtatgggatgggcccgcgttggattaggcagttggcggggtaacggcccaccaaaccgacgatccatagccgacctgagagggtgaccggccacattgggactgagacacggcccagactcctgcgggaggcagcagtgggggatattgcacaatgggggaaaccctgatgcagcgacgccgcgtgagtgaagaagtatttcggtatgtaaagctctatcggcagggaagaagatgacggtacctgcagaagaagctccgg

SEQ ID NO: 7509 - DNA, 490 bp, unidentified
  misc_feature 1..490: note = Ascusbbf_108324, encodes 16S rRNA
  source 1..490: mol_type = genomic DNA
agagtttgatcatggctcagagcgaacgctagcggcatgctttatacatgcaagtcgaacgaatgagtttatattgagtagcaatacgatttatgaatgagttagtggcgaacgggtgagtaatatataggaatttgcccagtagtgggggacaacagttagaaatgactgctaataccgcatacgtccgagaggagaaagatttatcgctattggagaagcctatacacgattagcttgttggtggggtaaaggcctaccaaggctgtgatcgttagccggtcttagaggatgatcggccacattgggactgagacacggcccagactcctacgggaggcagcagtagggaatattggacaatggacgcaagtctgatccagcaatgccgcgtgagtgatgaaggtgttatgcattgtaaaactcttttgcctgtgaagataatgacggtaacaggagaataagcaccgactaactatgtgccagcagc

SEQ ID NO: 7510 - DNA, 490 bp, unidentified
  misc_feature 1..490: note = Ascusbbf_256558, encodes 16S rRNA
  source 1..490: mol_type = genomic DNA
agagtttgatcatggctcaggacgaacgctggcggcacgcttaacacatgcaagtcgaacggagtttagagagcttgctttttaaacttagtggcggacgggtgagtaacacgtgagcaacctgccttcaagcgaggaataatgagtggaaacgctctgtaatacctcataacgtatttttaccgcatgataggaataccaaagatttatcacttgaagatgggctcgcgtccgattagctagttggtgaggtaacggctcaccaaggcgacgatcggtagccgtactgagaggtagatcggccacattgggactgagacacggcccagactcctacgggaggcagcagtggggaatattgcacaatggaggaaactctgatgcagcgatgccgcgtgagcgaagaaggccttttggttgtaaagctctgttatcagggacgaaaatgacggtacctgaggaggaagctccggctaactacgtgccagca

SEQ ID NO: 7511 - DNA, 468 bp, unidentified
  misc_feature 1..468: note = Ascusbbf_396430, encodes 16S rRNA
  source 1..468: mol_type = genomic DNA
agagtttgatcctggctcagaacgaacgctggcggcaggcataacacatgcaagtcgaacgccccgcaaggggagtggcagatgggtgagtaacgcgtgggaatctaccgtaccctacggaataacgcatggaaacgtgtgctaataccgtatacgccctacgggggaaagatttatcggggtatgatgagcccgcgttggattagctagttggtggggtaaaggcctaccaaggcgacgatccatagctggtctgagaggatgatcagccacattgggactgagacacggcctaaactcctacgggaggcagcagtggggaatattggacaatgggcgcaagcctgatccagccatgccgcgtgagtgatgaaggtcctaggattgtaaagctctttcaccgatgaagataatgacggtagtcggagaagaagccccggctaacttcgtgccagcagccgcggtaat

SEQ ID NO: 7512 - DNA, 490 bp, unidentified
  misc_feature 1..490: note = Ascusbbf_289866, encodes 16S rRNA
  source 1..490: mol_type = genomic DNA
agagtttgatcatggctcaggatgaacgctagcggcaggcctaacacatgcaagtcgaggggcatcacgggggagcttgcttccctggtggcgaccggcgcacgggtgaggagcacgtatggaacctgcccctgtcaggggaatagcccagggaaacttggattaatgccccatggtaccgggatatcgcatgatatcacggttaaagatttatcggacagggatggccatgcgcaccattagctagttgggggggtaacggcccaccaaggcgacgatggttaggggccctgagagggggatcccccacactggtactgagacacggaccagactcctacgggaggcagcagtgaggaatattggacaatggccgagaggctgatccagccatgccgcgtgcaggatgaccgccctatgggtcgtaaactgcttttgtacgggaagaaacccccccacgtgtggggggctgacggtaccgtaagaataa

SEQ ID NO: 7513 - DNA, 490 bp, unidentified
  misc_feature 1..490: note = Ascusbbf_1390105, encodes 16S rRNA
  source 1..490: mol_type = genomic DNA
agagtttgatcctggctcaggacgaacgctggcggcatgcttaacacatgcaagtcgaacgggacgttgacaaatcagcgatgaggcggagacgtttagtggcgaacgggtgagtaacgcgtgagcaacctgccttgtacaccgggataccgaagggaaactttcgttaatacgggataagaccacagcaccgcatggtgcaggggtcaaagcgaattagcggtacaagatgggctcgcgtcccattagctagttggcgggataacagcccaccaaggcgacgatgggtagccgacttgagagagggatcggccacaatggaactgagacacggtccatactcctacgggaggcagcagtggggaatattgggcaatgggcgcaagccttacccagcaatgccgcgtgaatgaagaaggtcttcggattgtaaagttcttttattagtgacgaacgcaatgacggtagctaatgaataagccccggctaa

SEQ ID NO: 7514 - DNA, 487 bp, unidentified
  misc_feature 1..487: note = Ascusbbf_107597, encodes 16S rRNA
  source 1..487: mol_type = genomic DNA
agagtttgatcatggctcagaacgaacgctggcggcatgcttaacacatgcaagtcgaacgatgttttttagtacttgtattaaggaacatagtggcaaacgggtgagtaacgcgtgggaatgtaccctttagtattgaataacgtttggaaacgaacgctaatacaatataacctcgagagagcaaagagaaatcgctgaaggagcagcccgcgttagattaggtagttggtggggtaaaggcctaccaagcctgcgatctatagctggtctgagaggatgaacagccacattgggactgagacacggcccagactcctacgggaggcagcagtggggaatattggacaatgggggaaaccctgatccagcaatgccgcgtgagtgaagaaggccttcgggtcgtaaaactctttaacaagtgaagataatgacggtaacttgtggaaaaagctccggctaacttcgtgccagcagccgcggtaat

SEQ ID NO: 7515 - DNA, 490 bp, unidentified
  misc_feature 1..490: note = Ascusbbf_304759, encodes 16S rRNA
  source 1..490: mol_type = genomic DNA
agagtttgatcctggctcaggatgaatgctggcggcgtgcctaatacatgcaagtcgaacggtaacagggtctcactgttctcttgacgctcttggcctattggtaagagttatagattcgagggaactgtgagattgctgacgagtggcggacggctgagtaacgcgtgggaacataccctaaactgagggataactagtcgaaagattagctaataccgcatattatctacggatcaaagtcttcggacggtttaggaatggcctgcgtacgattagatagttggtgaggtaaaggctcaccaagtcgacgatcgttagatggtttgagaggatgatcatccagactgggactgagacacggcccagactcctacgggaggcagcagtagggaatctttcacaatgggcgaaagcctgatggagcaacgccgcgtgcaggatgaaggccttcgggttgtaaactgcttttatttccgagaaatatgat

SEQ ID NO: 7516 - DNA, 490 bp, unidentified
  misc_feature 1..490: note = Ascusbbf_218570, encodes 16S rRNA
  source 1..490: mol_type = genomic DNA
agagtttgatcctggctcaggacaaacgctggcggcgtgcctaacacatgcaagtcgaacgagaatcttcggaaagagacttcggtcaatggaaggagaggacagtggcggacgggtgagtaatgcatgagcaacctgccttggagtgggggacaacagttggaaacgactgctaataccgcatgaagttacgggggggcatcctcctgtaaccaaagatttatcgctctgagatgggctcatgtctgattagatagttggcggggcaacggcccaccaagtctgcgatcagtagccggactgagaggttgaacggccacattgggactgagatacggcccagactcctacgggaggcagcagtggggaatattgggcaatgggcgcaagcctgacccagcaacgccgcgtgaaggaagaaggctttcgggttgtaaacttcttttatcagggacgaaggatgtgacggtacctgatgaataagccacgg

SEQ ID NO: 7517 - DNA, 490 bp, unidentified
  misc_feature 1..490: note = Ascusbbf_420293, encodes 16S rRNA
  source 1..490: mol_type = genomic DNA
agagtttgatcatggctcagaatgaacgttagcggcgtggattaggcatgcaagtcgagcgacaaggtcagatggatcccttcggggtgaagtctgactggaggagcggcaaacggggtagtaaggcgtcggaacgtaccctggggaccaggatagccgcgggaaactgcgtgtaatactggataacctctgtggagcaaatggtttattccgccacaggagcggccgacgtgatactaggtagttggtaaggtaatggcttaccaagcctttgatgtctagggggtgtgagagcatggcccccaccactgggactgagacactgcccagacacctacgggtggctgcagtcgagaatctttggcaatggacgcaagtctgaccaagcgacgccgcgtgcgggatgaaggcccttgggttgtaaaccgctgtcaggggggaggaaagcttcggcttgaccgagccccagaggaagcacgggctaagtacg

SEQ ID NO: 7518 - DNA, 490 bp, unidentified
  misc_feature 1..490: note = Ascusbbf_1816096, encodes 16S rRNA
  source 1..490: mol_type = genomic DNA
agagtttgatctggccaggatgaacgctggcggcgtgcttaacacatgcaagtcgaacgaagctccatttaagatttcttcggaatgattttgtggatgacttagtggcggacgggtgagtaacgcgtgaggaacctgccttgcagaggggaataacagttagaaacggctgctaataccgcataatacgaaggagtcgcatgattttttcgtcaaagatttatcgctgtgagatggcctcgcgtctgattagctagttggtgaggtaacggcccaccaaggcgacgatcagtagccggactgagaggttgaacggccacattgggactgagacacggcccagactcctacgggaggcagcagtggggaatattgggcaatgggcgcaagcctgacccagcaacgccgcgtgaaggaagaaggctttcgggttgtaaacttcttttaagtgggacgataatgacggtaccacttgaataagctccggcta

SEQ ID NO: 7519 - DNA, 490 bp, unidentified
  misc_feature 1..490: note = Ascusbbf_191241, encodes 16S rRNA
  source 1..490: mol_type = genomic DNA
agagtttgatcctggctcagaatgaacgttggcggcgtggattaggcatgcaagtcgtacgagaacctcaactagcttgctaggagaggggacagtggcgaaagggagagtaaggcgtggttacatgccctcgagttcgggatagtaacgggaaactgttagtaataccggataatatctttggatcaaaggtgagattccgctcgaggattggaccgcgtgctattagcttgttggtgaggtaatggctcaccaaggctacgatggctaccgggtgtgagagcatggcccggctcactgggactgagacactgcccagacacctacgggtggctgcagtcgagaatctttggcaatgggcgaaagcctgaccaagcgacgccgcgtgcgggatgaaggccctcgggttgtaaaccgctgtcagaagctaggaaatgctagggggtactccccttagcttgaccgatcttcagaggaaggacgggctaag

SEQ ID NO: 7520 - DNA, 490 bp, unidentified
  misc_feature 1..490: note = Ascusbbf_207920, encodes 16S rRNA
  source 1..490: mol_type = genomic DNA
agagtttgatcatggctcaggatgaacgctggcggcgtgcttaatacatgcaagtcgaacgaagcacctctcccgaagattgatctagcttgctagtgattgattcatttgaggtgactgagtggcggacgggtgagtaacgcgtgggtaacctgccttatacagggggataacagttagaaatgactgctaataccgcataagcgcacagtatcgcatgatacagtgtgaaaaactccggtggtataagatggacccgcgtctgattagctagttggtgaggtaacggcccaccaaggcaacgatcagtagccgacttgagagagtgatcggccacattgggactgagacacggcccaaactcctacgggaggcagcagtagggaatattgcacaatgggggaaaccctgatgcagcgacgccgcgtgaaggatgaagtatttcggtatgtaaacttctatcagcaaggaagaaaatgacggtacttga

SEQ ID NO: 7521 - DNA, 490 bp, unidentified
  misc_feature 1..490: note = Ascusbbf_1780102, encodes 16S rRNA
  source 1..490: mol_type = genomic DNA
agagtttgatcatggctcaggacgaacgctggcggcgtgcttaaaacatgcaagtcgaacggagtttatgagtagcttgctacgagtaaacttagtggcggacgggtgagtaacacgtgagcaacctgcctatcacagggggataacacttagaaataggtgctaataccgcatatgaccacagaccggcatcggtcagaggtgaaaggagttaaatctggtgatagaggggcttgcgtatcattagctagttggtgagggtaacggcccaccaaggctacgatgattagccgatctgagaggatgaccggccacattggaactgagatacggtccaaactcctacgggaggcagcagttaggaatattgggcaatggaggaaactctgacccagcaacgccgcgtgaaggatgaaggttttcggattgtaaacttctgatctgtggaaagaaacaaatgacggtaccacaggagcaagccccggctaac

SEQ ID NO: 7522 - DNA, 490 bp, unidentified
  misc_feature 1..490: note = Ascusbbf_287525, encodes 16S rRNA
  source 1..490: mol_type = genomic DNA
agagtttgatcatggctcaggatgaacgctagcggcaggcttaacacatgcaagtcgaggggcagcgagatgtagcaatacattgtcggcgaccggcagacgggtgcgtaacgcgtatgcaacctgcccgccacaggggtatagcccggcgaaagccggaataatcccccatagttccacatttccgcatggtaatgtggataaacgggtgaccgggtggcggatgggcatgcgtggcattaggcagttggcggggtaacggcccaccaaaccgacgatgcctaggggtcctgagagggaggtcccccacattggaactgagacacggtccaaactcctacgggaggcagcagtgaggaatattggtcaatgggcgagagcctgaaccagccatgccgcgtgcaggaagacggccttatgggttgtaaactgcttttattggggacgagcatgagtacgcgtactcaaatgacggtacccgatgaataag

SEQ ID NO: 7523 - DNA, 490 bp, unidentified
  misc_feature 1..490: note = Ascusbbf_150745, encodes 16S rRNA
  source 1..490: mol_type = genomic DNA
agagtttgatcatggctcaggacgaacgctggcggcgtgcctaacacatgcaagtcgaacggagatacacgctgaagtgagagcagcttgctgaaggatcttcttgtgtatcttagtggcggacgggtgagtaacgcgtgagcaacctgcctttcagagggggataacgtttggaaacgaacgctaataccgcatgagactacggtactgcatggtacagtggtcaaaggagcaatccgctgaaagatgggctcgcgtccgattagatagttggcggggtagaggcccaccaagtcgacgatcggtagccggactgagaggttgaacggccacattgggactgagacacggcccagactcctacgggaggcagcagtgagggatattggtcaatgggggaaaccctgaaccagcaacgccgcgtgagtgatgacggtcttcggattgtaaagctctgtcctctgtgaagatgatgacggtagcagaggag

SEQ ID NO: 7524 - DNA, 490 bp, unidentified
  misc_feature 1..490: note = Ascusbbf_163122, encodes 16S rRNA
  source 1..490: mol_type = genomic DNA
agagtttgatcctggctcagaacgaacgctggcggcgcgttttaagcatgcaagttgagcggtaacttggatttattcaagctagagcggcggacgggtgagtaacacgtggataatctggcctacagttgggaatagcctgatgaaagtcaggataatgccgaatgagcagttgacggcacaagctgttgattggaaaggggctaaggcctcgctgaaggatgagtccgcgtcccattagttagatggtggggtaaaggcctaccatggcaatgatgggtagccggcctaagagggtggacggccacattgggactgagatacggcccagactcctacgggaggcagcagctaagaatcttccgcaatggtcgaaagactgacggagcgacgccgcgtgaacgatgaaggccgtgaggttgtaaagttcttttcaggagggagaataaggcttatagggaatgataggctgatgacatgaatcctggaa

SEQ ID NO: 7525 - DNA, 490 bp, unidentified
  misc_feature 1..490: note = Ascusbbf_1525689, encodes 16S rRNA
  source 1..490: mol_type = genomic DNA
agagtttgatcatggctcaggatgaatgctggcggcgtgcctaatacatgcaagtcgagcggtaacatggcttcaccgtgttcttgacactccgggcgtattcgcgggaggacagattcgaggacacagtgaagctgatgacgagcggcggacggctgagtaacgcgtgggaacgtaccctaaactgagggataactagtcgaaagattagctaataccgcatatgatcttcggattaaagctttcgggcggtttaggaatggcctgcgtacgattagatagttggtgaggtaacggctcaccaagtcgacgatcgttagatggtttgagaggatgatcatccagactgggactgagacacggcccagactcctacgggaggcagcagtagggaatctttcacaatgggcgaaagcctgatggagcaacgccgcgtgcaggatgaaggccttcgggttgtaaactgcttttatatccgagaaatatgatg

SEQ ID NO: 7526 - DNA, 490 bp, unidentified
  misc_feature 1..490: note = Ascusbbf_252450, encodes 16S rRNA
  source 1..490: mol_type = genomic DNA
agagtttgatcctggctcaggatgaacgctggcggcacgcttaacacatgcaagtcgagcgggacttgagacttcggtcttaagttcagcggcggacgggtgagtaacacgtgggtaacctaccctataccgggggataacgtatagaaatgtacgctaataccgcataagccaacagggacgcatgttccggttggaaaagttccggcgatataggatgggcccgcgactgattagctagttggtgaggtaacggcccaccaaggcgacgatcagtagccggtctgagaggatggacggccacattgggactgagacacggcccagactcctacgggaggcagcagtggggaatattgcacaatgggggaaaccctgatgcagcgatgccgcgtgaaggatgaagtatttcggtatgtaaacttctatcagcagggaagaaaaaggacagtacctgactaagcagccccggctaactacgtgccagcag

SEQ ID NO: 7527 - DNA, 490 bp, unidentified
  misc_feature 1..490: note = Ascusbbf_307055, encodes 16S rRNA
  source 1..490: mol_type = genomic DNA
agagtttgatcatggctcagaatgaacgttggcggcatggattaggcatgcaagtcgagcgagaaccctaagatggaggcttcggccaaagtcttagggggacagcggcgaaagggtgagtaatacgtagttacctgccccagggtctagaatagcttcgggaaactgaaggtaatgctggataatatctccggatcaaaggtgagattccgccctgggaggggactgcgtcctactagcttgttggtggggtaatggcctaccaaggctacgatgggtagcgggcgtgagagcgtggcccgccacactgggactgagacactgcccagacacctacgggtggctgcagtcgagaatcttcggcaatgcgcgaaagcgtgaccgagcaatgccgcgtgcgggatgaaggccttcgggttgtaaaccgcgaaagtaaggaggaaggctctgcgaagagcagagtttgaccaatttacagtaaggacgggct

SEQ ID NO: 7528 - DNA, 490 bp, unidentified
  misc_feature 1..490: note = Ascusbbf_721678, encodes 16S rRNA
  source 1..490: mol_type = genomic DNA
agagtttgatcatggctcaggatgaacgctagcggcaggcttaacacatgcaagtcgaggggcagcggagaagtagcaatacttctgccggcgaccggcgcacgggtgagtaacgcgtatgcaacctttcccagacagggggatagcccagggaaacttggattaataccccgtaagccagaagaggcatcctcgtctggttaaagttccggcggtctggggtgggcatgcgtgccattaggcagttggtggggtaacggcccaccaaaccgacgatggctacggggtctaaaaggatggtcccgcacattggaactgagacacggtccaaactcctacgggaggcagcagtgaggaatattggtcaatgggggtaactctgaaccagccatgccgcgtggaggaagacggccctacgggttgtaaactcctttagcacgggaataaactcagtcacgcgtgactgattgaaggtaccgtgagaataagc

SEQ ID NO: 7529 - DNA, 488 bp, unidentified
  misc_feature 1..488: note = Ascusbbf_579126, encodes 16S rRNA
  source 1..488: mol_type = genomic DNA
agagtttgatcctggctcagaatgaacgctggcggcatggattaggcatgcaagtcgaacggggcccttcagggcccagtggcggaagggtgagtaacacgtgagcaacccgcccccaaggccggaacaagcgctggaaacggcgtctgaaaccggatgaggatctcctccgcatggaggggcgtccaaatattcataccctggggatgggctcgcggcccattagcttgtcggcggggcggcggcccaccgaggcgacgacgggtaggtggtctgagaggatggtcacccacactgggactgagacaccgcccagactcctgcgggaggctgcagtcgagaatcttccgcaatgggcgcaagcctgacggagcgatgccgcgtgagggacggaggccttcgggtcgtggacctctgtcgcccgggacgatgatgacggtacctgacgaggaagccacggctaactacgtgccagcagccgcggtaat

SEQ ID NO: 7530 - DNA, 490 bp, unidentified
  misc_feature 1..490: note = Ascusbbf_419469, encodes 16S rRNA
  source 1..490: mol_type = genomic DNA
agagtttgatcatggctcaggattaacgctggcggcatgcctaatacatgcaagtcaaacgggtgtacttgtacaccagtggcgaacgggtgagtaatatataggtaacttgcccttaagacgaggataaccattggaaacgatggataatactggataggatagtttaacgcatgttttactatttaaagacgctctcaagcgtcacttaaggagaggcctatatcgcattagcttgttggtgaggtaacggctcaccaaggcgacgatgcgtaactgtgctgagaggcaaaacagtcacattggaacttagacacggtccaaactcctacgggaggcagcagtagggaattttcggcaatgggggaaaccctgaccgagcaatgccgcgtgaatgatgaagatcttcggatcgtaaaattctgttgttagggaagaatgctagtggtaggaaatgatcattagttgacagtacctgactagaaagccc

SEQ ID NO: 7531 - DNA, 486 bp, unidentified
  misc_feature 1..486: note = Ascusbbf_97537, encodes 16S rRNA
  source 1..486: mol_type = genomic DNA
agagtttgatcatggctcagaacgaacgctggcggcatgcctaacacatgcaagtcgaacgatggcttcggccatagtggcgcacgggtgagtaacgcgtggggatctgcccagcagtggggaataacctcgggaaactgaggctaataccgcatacgccccttggatgtaagagtccttgggggaaagatttatcgctgttggatgaacccgcgtcggattagctagttggtggggtaagagcccaccaaggcgacgatccgtagctggtctgagaggatgatcagccacactgggactgagacacggcccagactcctacgggaggcagcagtggggaatattggacaatgggcgcaagcctgatccagcaatgccgcgtgaatgatgaaggccctagggttgtaaagttctttcgacggggacgatgatgacggtacccgtagaagaagccccggctaacttcgtgccagcagccgcggtaat

SEQ ID NO: 7532 - DNA, 490 bp, unidentified
  misc_feature 1..490: note = Ascusbbf_737461, encodes 16S rRNA
  source 1..490: mol_type = genomic DNA
agagtttgatcctggctcaggacgaacgctggcggcgtgcctaacacatgcaagtcgagcggggacatacggaacgagggattcgtcctgagggaaatgtgttctagcggcggacgggtgagtaacgcgtgaacgatctgtccctgacagggggataacacatggaaacaggtgctaataccgcataagaccacagcgctgcatggcgcaggggtcaaaggagtaatccggtgaggggtgagttcgcgtctgattagatagttggtgaggtaacggcccaccaagtcaacgatcagtagccgacctgagagggtgatcggccacattggaactgagacacggtccaaactcctacgggaggcagcagtgggaatattgggcaatgggcgaaagcctgacccagcaacgccgcgtgagggatgaaggttttcggattgtaaacctctgtccttggtgacgaaggaagtgacggtagccaaggaggaagccc

SEQ ID NO: 7533 - DNA, 480 bp, unidentified
  misc_feature 1..480: note = Ascusbbf_423337, encodes 16S rRNA
  source 1..480: mol_type = genomic DNA
agagtttgatcctggctcaggatgaacgctggcggcgtgcctaaaacatgcaagtcgagcggtaaggccccttcgggggtacacgagcggcggacgggtgagtaacacgtgggaatctaccccaaactgagggataagcaccggaaacggtgtctaataccgcatatggtcttcggattaaagcttcggcggtttgggaagagcccgcgtaagattagctagttggtgaggtaaaggcttaccaaggctacgatctttagctggtttgagaggatgatcagccacactggaactgagacacggtccagactcctacgggaggcagcagttaggaattttccacaatgggcgcaagcctgatggagcaacgccgcgtgcaggatgaaggttttcggattgtaaactgcttttatgtgcgaagaatatgacggtaacacatgaataaggatcggctaactccgtgccagcagccgcggtaat

SEQ ID NO: 7534 - DNA, 490 bp, unidentified
  misc_feature 1..490: note = Ascusbbf_228749, encodes 16S rRNA
  source 1..490: mol_type = genomic DNA
agagtttgatcctggctcaggatgaacgctggcggcgtgcttaacacatgcaagtcgaacgattaaaccgccctcgggcggacatagagtggcgaacgggtgagtaacacgtgaccaacctgccccatgctccgggataacctgcggaaacgcaggctaataccggatactccgcgcgggccgcatggcccgggcgggaaagcccttacggcatgggatggggtcgcggcccattaggtagacggcggggtgacggcccaccgtgcccgcgatgggtagccgagctgagaggctgaccggccacattgggactgagatacggcccagactcctacgggaggcagcagtggggaattttgcgcaatgggcgaaagcctgacgcagcaacgccgcgtgcgggatggaggccttcgggttgtaaaccgctttcagcagggacgaacgctgacggtacctgcagaagaagctccggctaactacgtgccagcag

SEQ ID NO: 7535 - DNA, 490 bp, unidentified
  misc_feature 1..490: note = Ascusbbf_1826945, encodes 16S rRNA
  source 1..490: mol_type = genomic DNA
agagtttgatcatggctcaggatgaacgctagcgacaggcctaacacatgcaagtcgaacgaggttaatgagaggaagacttcggttggaatcttattatccgagtggcggacgggtgagtaacgcgtgagcaacctgtcttacacagggggataacgctccgaaaggagtgctaataccgcataggaccacggtgctgcatggcaccgaggtgaaaggagcaatccggtgtaaggtgggctcgcgtcccattagatagttggtgaggtaacggcccaccaagtcgacgatgggtagccgacctgagagggtgatcggccacattggaactgagatacggtccagactcctacgggaggcagcagtggggaatattgggcaatgggcgcaagcctgacccagcaacgccgcgtgagggaagaaggtcttcgggttgtaaacctctgtcctaagtgaaaaggaaggatggtagcttaggaggaagccccgg

SEQ ID NO: 7536 - DNA, 490 bp, unidentified
  misc_feature 1..490: note = Ascusbbf_1040170, encodes 16S rRNA
  source 1..490: mol_type = genomic DNA
agagtttgatcctggctcaggacgaacgctggcggcgtgcctaacacatgcaagtcggacggactgagctccttcgggggcgaaagttagtggcgaacgggtgagtaacgcgtgaggaacctgcctttcagagggggacaacagttggaaacgactgctaataccgcataacatattactttcgcatgaaagggatatcaaagattttatcgctgaaagatggcctcgcgtctgattagatagttggtggggtaacggcccaccaagtcgacgatcagtagccggactgagaggttgaacggccacattgggactgagatacggcccagactcctacgggaggcagcagtggggaatattgggcaatgggcgcaagcctgacccagcaacgccgcgtgaaggaagaaggctttcgggttgtaaacttcttttaccagggacgaaggatgtgacggtacctggagaaaaagccacagctaactacgtgcca

SEQ ID NO: 7537 - DNA, 490 bp, unidentified
  misc_feature 1..490: note = Ascusbbf_177145, encodes 16S rRNA
  source 1..490: mol_type = genomic DNA
agagtttgatcatggctcaggatgaacgctagcggcaggcttaacacatgcaagtcgaggggcagcgcgttgtagcaatacaatggcggcgaccggcgaaagggtgcgtaacacgtgagcaacctgccccgttccgggggataggaggtggaaacgccttgtaataccccataacaacgtaggctgcatggcctatgtttgaaaaattcgttggaacgggatgggctcgcgggacattagctggttggcggggtaacggcccaccaaggcgacgatgtctaggggttctgagaggaaggtcccccacactggaactgagacacggtccagactcctacgggaggcagcagtgaggaatattggtcaatggccggaaggctgaaccagccatgccgcgtgcaggaataaggccctacgggtcgtaaactgcttttgcggtggagcaataaggtgtacgcgtacaccgatgagagtacatcgcgaataagca

SEQ ID NO: 7538 - DNA, 490 bp, unidentified
  misc_feature 1..490: note = Ascusbbf_1847921, encodes 16S rRNA
  source 1..490: mol_type = genomic DNA
agagtttgatcatggctcaggatgaacgctggcggcgtgcataacacattcaagtcgaacgaagcactttggcggaaccttcgggggaagctgatttgacttagtggcggacgggtgagtaacgcgtgagcaaccttcctgcttgtgagggataacacagggaaacttgtgctaataccgcatgacgcatagatatcgcatggtgactatgccaaagacatgttgcaggcagatgggctcgcgtctgattagatagtaggtgaggtaacggcccacctagtcgacgatcagtagccggactgagaggttgaacggccacattggaactgagatacggtccagactcctacgggaggcagcagtggggaatattgggcaatgggcgaaagcctgacccagcgacgccgcgtgagggaagaaggtcttcggattgtaaacctctttcagcaaggaagaagaaagtgacggtacttgcagaagaagccacggc

SEQ ID NO: 7539 - DNA, 490 bp, unidentified
  misc_feature 1..490: note = Ascusbbf_716294, encodes 16S rRNA
  source 1..490: mol_type = genomic DNA
agagtttgatcctggctcaggatgaacgctggcggcgtgcttaacacatgcaagtcgaacgaagcactggaagcggatttcttcgggatgaagcatcctttgacttagtggcggacgggtgagtaacgcgtgggcaacctgccgtatgcagggggacaacagctggaaacggctgctaataccgcataagcgcacgatgccgcatggcaacgtgtgaaaagatttatcggcatacgatgggcccgcgttggattaggcagttggcgtggcaacggcacaccaaaccgacgatccatagccgacctgagagggtgaccggccacattgggactgagacacggcccaaactcctacgggaggcagcagtggggaatattgcacaatgggggaaaccctgatgcagcgacgccgcgtgagtgaagaagtatttcggtatgtaaagctctatcagcagggaagaaagtgacggtacctgcacaagaagccccgg

SEQ ID NO: 7540 - DNA, 490 bp, unidentified
  misc_feature 1..490: note = Ascusbbf_726132, encodes 16S rRNA
  source 1..490: mol_type = genomic DNA
agagtttgatcatggctcaggatgaacgctggcggcgtgcctaatacatgcaagtcgaacggagacctcttcggagatcttagtggcgaacgggtgagtaacacatgaggaacctgcccattagacggggatagcttctggaaacgggaggtaataccggataaaagcgggggaggcatcttccccatttaaaagggtgctacggcatcgcttatggatggcctcatggtgcattagttagacggcggggtaacggcccaccgtgacgatgatgcatagccgatctgagaggatgaccggccacattgggactgagacacggcccagactcctacgggaggcagcagtagggaattttcggcaatgggcgaaagcctgaccgagcaacgccgcgtgagtgataaggccttcgggttgtaaagctctgttgccggggacgaaggatgcggatagggaatgatccgcaggtgacggtacccggccagaaagc

SEQ ID NO: 7541 - DNA, 490 bp, unidentified
  misc_feature 1..490: note = Ascusbbf_198703, encodes 16S rRNA
  source 1..490: mol_type = genomic DNA
agagtttgatcatggctcagagcgaacgctagcggaatgctttatacatgcaagtcgaacgaacgagtttatattgagtagcaatacgatttataaatgagttagtggcaaacgggtgagtaatagttaggaacttgccgaatagtgggggacaacagatagaaatgtctgctaataccgcatattcccgagaggggaaagatttattgctatttgagaggcctaaccacgattagcttgttggtgagataaaagcccaccaaggcggtgatcgttagccggtctaagaggatgatcggccacatcgggactgagacacggcccggactcctacgggaggcagcagtagggaatattggacaatgggggcaaccctgatccagcaattccgcgtgagtgatgaaggtgttatgcattgtaaaactcttttgcctgcgaagataatgacggtagcaggagaataagcaccgactaactatgtgccagcagc

SEQ ID NO: 7542 - DNA, 490 bp, unidentified
  misc_feature 1..490: note = Ascusbbf_1533166, encodes 16S rRNA
  source 1..490: mol_type = genomic DNA
agagtttgatcatggctcagaatgaacgttggcggcgtggattaggcatgcaagtcgagcgcgaacccagcaatgggtgaaagccgcggaagggacaggaatgcgtaggttacgtacccttgggactggaatagctgcgggaaactgcaggtaatgccagataatatcttcggatcaaggtgtgattccgcccatggagcggcctacgtcctattagtttgttggtggggtaatggcctaccaaggctttgatgggtagcgggtgtgagagcatgacccgcgtcactgggactgagacactgcccagacacctacgggtggctgcagtcgagaatcttcggcaatgggcgaaagcctgaccgagcgacgccgcgtgcgggatgaaggccttcgggttgtaaaccgctgtcaatggggaggaaggctacgtgaagagcgtagtttgacctatctttggaggaaggacgggctaagttcgtgccagcagcca

SEQ ID NO: 7543 - DNA, 490 bp, unidentified
  misc_feature 1..490: note = Ascusbbf_709213, encodes 16S rRNA
  source 1..490: mol_type = genomic DNA
agagtttgatcatggctcaggatgaacgctagcggcaggcttaacacatgcaagtcgaggggcagcgcgggtggcaacacctggcggcgaccggcgaaagggtgagtaacgcgtgagcaacgtgcccgtggttgggggatagtcgatggaaacgtcgcgtaataccccgtaacatcagttaccgcatggtgattggttgagagatttattgtccacggatcggctcgcgtgccattaggtagacggcggggtaacggcccaccgtgccgacgatggctaggggttctgagaggaaggtcccccacattggaactgagacacggtccagactcctacgggaggcagcagtgaggaatattggacaatggccgggaggctgatccagccatgccgcgtgcgggaagacggccctacgggttgtaaaccgcttttgcgagggagcaataatcactacgtgtagtgagatgagagtaccttacgaataagcatc

SEQ ID NO: 7544 - DNA, 490 bp, unidentified
  misc_feature 1..490: note = Ascusbbf_1880142, encodes 16S rRNA
  source 1..490: mol_type = genomic DNA
agagtttgatcatggctcaggatgaacgctagcggcaggcttaacacatgcaagtcgaggggcagcgcgggtagcaatatctggcggcgaccggcgaaagggtgagtaacgcgtgagcaacatacccgtatgagggggatagtcattggaaacgatgcgtaataccccgtaacatagatcatcgcatggtgatgtattgaaagatttattgcatacggattggctcgcgtaccattaggtagttggcggggtaacggcccaccaagccgacgatggttaggggttctgagaggaaggtcccccacattggaactgagacacggtccagactcctacgggaggcagcagtgaggaatattggtcaatggccgggaggctgaaccagccatgccgcgtgcgggaggacggccctatgggttgtaaaccgcttttgtcggggagcaataagcgccacgtgtggcgcgatgagagtacctggcgaataagcatc

SEQ ID NO: 7545 - DNA, 490 bp, unidentified
  misc_feature 1..490: note = Ascusbbf_1366818, encodes 16S rRNA
  source 1..490: mol_type = genomic DNA
agagtttgatcatggctcaggatgaacgctggcggcgtgcctaacacatgcaagtcgagcggggacacggggcttcggtcccgtgtttcagcggcggacgggtgagtaacgcgtgagcaatctgtcccattcaccgggataacaactggaaacagttgctaataccgggcgagaccacggtgccgcatggcgcaggggtagaagggataccggagtggggtgagctcacgtcccattaggtagttggtgaggtaagggcccaccaagccgacgatgggtagccgacctgagagggtgatcggccacactggaactgagacacggtccagactcctacgggaggcagcagtggggaatattgggcaatgggcgaaagcctgacctagcaacgccgcgtgagggaagaaggttttcggattgtaaacctctgtcctaagtgacaaaggaagtgacggtagcttaggaggaagccccggctaactacgtgcca

SEQ ID NO: 7546 - DNA, 490 bp, unidentified
  misc_feature 1..490: note = Ascusbbf_379965, encodes 16S rRNA
  source 1..490: mol_type = genomic DNA
agagtttgatcatggctcaggacgaacgctggcggcatgcctaacacatgcaagtcgaacggagagatctcaccgtcgaagcttgaggtgcttgcaccgagagtggagacaccgagatatcttagtggcggacgggtgagtaacgcgtgagcaacctggctttaagagggggacaacactgagaaatcagtgctaataccgcataagactcagttttcgcatgggaaaagagttaaaggagaaatccgcttaaagatgggctcgcgtcccattagttagttggtgaggtaacggctcaccaagacgacgatgggtagccggactgagaggttgaacggccacactgggactgagacacggcccagactcctacgggaggcagcagtggggaatattgggcaatgggcgaaagcctgacccagcaatgccgcgtgaatgaagaaggtcttaggattgtaaaattctgtcctgcgggaagaaacaaatgacg

SEQ ID NO: 7547 - DNA, 490 bp, unidentified
  misc_feature 1..490: note = Ascusbbf_948059, encodes 16S rRNA
  source 1..490: mol_type = genomic DNA
agagtttgatcctggctcaggatgaacgctggcggcgtgcctaacacatgcaagtcgaacggttaacccgccttcgggcggttataaagtggcgaacgggtgagtaacacgtgaccaacctgccccgcgctccgggacagcctcgcgaaagcgggattaataccggatgcgcccctcggtccgcatggacggagggggaaagcccaggcggcgcgggatggggtcgcggcccatcaggtagtaggtcgggtagaggccgacctagccgacgacgggtagccgggttgagagaccgaccggccacattgggactgagatacggcccagactcctacgggaggcagcagtggggaatattgcgcaatggggggaaccctgacgcagcaacgccgcgtgcgggatgacggccctcgggttgtaaaccgctttcagcagggaagacatcgacggtacctgcagaagaagccccggctaactacgtgccagcagc

SEQ ID NO: 7548 - DNA, 490 bp, unidentified
  misc_feature 1..490: note = Ascusbbf_1008712, encodes 16S rRNA
  source 1..490: mol_type = genomic DNA
agagtttgatcctggctcaggacgaacgctggcggcgtgcttaacacatgcaagtcgaacgagggatatgagagagcttgctcgattgtattccgagtggcggacgggtgagtaacgcgtgaggaacctgtcttacacaggggaataacgcaccgaaaggtgtgctaataccgcataagaccacgcctgcgcatgcaggaggggtcaaaggagcaatccggtgtaaggtggcctcgcgtcccattaggcagttggtgaggtaacggcccaccaaaccgacgatgggtagccgacctgagagggtgatcggccacattggaactgagacacggtccaaactcctacgggaggcagcagtggggaatattgggcaatgggcgcaagcctgacccagcaacgccgcgtgagggaagaaggttttcggattgtaaaactctgtcctcaatgaaaagcgagagatggtaattgaggaggaagccccggctaacta

SEQ ID NO: 7549 - DNA, 490 bp, unidentified
  misc_feature 1..490: note = Ascusbbf_1321098, encodes 16S rRNA
  source 1..490: mol_type = genomic DNA
agagtttgatcctggctcaggatgaacgctggcggcgtgcctaatacatgcaagtcgagcggtaaggctcctgcagattatttaagcggtgaatactcacaactcacactcccggctaggagtgagagcaagcttgaataatgcgctggagtacacgagcggcggacgggtgagtaacgcgtaagaatgtaccccaaactgagggataactgctcgaaagagtagctaataccgcatgtgctcttcggagtaaagcttcggcggtttgggaacagcttgcgtaggattagctagttggtaaggtaacggcttaccaaggcgacgatccttagctggtctgagaggatgatcagccacactgggactgagacacggcccagactcctacgggaggcagcagtagggaattttccacaatgggggcaaccctgatggagcaacgccgcgtgatggatgaaggctttcgggtcgtaaacatcttttctctgtg

SEQ ID NO: 7550 - DNA, 490 bp, unidentified
  misc_feature 1..490: note = Ascusbbf_1438290, encodes 16S rRNA
  source 1..490: mol_type = genomic DNA
agagtttgatcctggctcaggacgaacgctggcggcgtgcttaacacatgcaagtcgaacgggaagcagcaatgctctcagtggcggacgggtgagtaacgcgtgagcaacctgcccttgtcaggggaataacacagagaaatctgtgctaataccgcataatattatagtgaggcatctcattgtaatcaaagcgatttagcggacaaggatgggctcgcgtcccattaggtagttggtgaggtaacggctcaccaagccgacgatgggtagccgacctgagagggtgatcggccacattggaactgagaacggtccagactcctacgggaggcagcagtggggaatattgggcaatggagggaactctgacccagcaacgccgcgtgaatgaagaaggtcttcggattgtaaagttctgtgatgggggacgaagaaagtgacggtaccccaatagcaagctacggctaactacgtgccagcagccgcg

SEQ ID NO: 7551 - DNA, 490 bp, unidentified
  misc_feature 1..490: note = Ascusbbf_1831408, encodes 16S rRNA
  source 1..490: mol_type = genomic DNA
agagtttgatcatggctcaggacgaacgctggcggcgtgcttaacacatgcaagtcgaatggaagtagaaatactttagtggcggacgggtgagtaacgcgtgagcaacctgcccttatcagggggacaacacagagaaatttgtgctaataccgcataacgttacgaacaggcatctgtttgtaaccaaagaattatcggataaggatgggctcgcgtcccattaggtagttggtgaggtaacggcccaccaagccgacgatgggtagccgatctgagaggatgaacggccacattggaactgggagacggtccagactcctacgggaggcagcagtggggaatattgggcaatgggcgcaagcctgacccagcaacgccgcgtgaatgaagaaggttttcggattgtaaagttctgtgatgggggacgaagaaagtgacggtaccccaatagcaagctacggctaactacgtgccagcagccgcggta

SEQ ID NO: 7552 - DNA, 490 bp, unidentified
  misc_feature 1..490: note = Ascusbbf_1872513, encodes 16S rRNA
  source 1..490: mol_type = genomic DNA
agagtttgatcatggctcaggacgaacgctggcggcgtgcttaatccatgcaagtcgaacggggcgatcccggaagtccttcggggcggaagggagagcttagtggcgaacgggtgagtaacgcgtgaccaaccaaccttaagcagggggacaacagctggaaacggctgctaataccgcataagaccacggtgaggcatcttacaggggtcaaaggagcaatccggcttaagacggggtcgcgtcccattagttagtaggtgaggcaacggctcacctagactgcgacgggtagccgagctgagaggctgatcggccacactgggactgagatacggcccagactcctacgggaggcagcaggaaggaatattgggcaatgggggaaaccctgacccagcaacgccgcgtgaaggaagaaggccttcgggttgtaaacttctgtgacaggggacgaaggaagtgacggtaccctgagaggaagctccgg

SEQ ID NO: 7553 - DNA, 490 bp, unidentified
  misc_feature 1..490: note = Ascusbbf_2235, encodes 16S rRNA
  source 1..490: mol_type = genomic DNA
agagtttgatcatggctcaggacgaacgctggcggcatgcctaacacatgcaagtcgaacggagttaagagagcttgcttttttaacttagtggcggacgggtgagtaacgcgtgagcaacctgcctttcagtggggaataatgttctgaaaagagcactaataccgcatgaagtatactgatcgcatggtcggaataccaaagatttatcgctgaaagatgggctcgcgtccgattagccagttggtggggtaacggcctaccaaagcgacgatcggtagccggactgagaggttgaacggccacattgggactgagacacggcccagactcctacgggaggcagcagtgggggatattgcgcaatgggggaaaccctgacgcagcaatgccgcgtgaaggatgaaggtcttcggattgtaaacttcttttgtcagggacgaacgatgacggtacctgacgaataagctccggctaactacgtgccagc

SEQ ID NO: 7554 - DNA, 490 bp, unidentified
  misc_feature 1..490: note = Ascusbbf_6506, encodes 16S rRNA
  source 1..490: mol_type = genomic DNA
agagtttgatcatggctcaggatgaacgctggcggcatgcctaagacatgcaagtcgaacgaagtggcccaacaatgatttgtgcttgcacaattctgcgatggatacccgcttagtggcagacgggtgagtaacacgtaagtaatctgccttcaagactgggataacgtttggaaacgaacgctaataccggatgattcataattagataactatttatgctaaaaggggcttcggcctcacttgaagatgagcttgcggcgtattaactagttggtggggtaatggcctaccaaggtgacgatgcgtagccgagctgagaggctaatcggccacattgggactgagacacggcccaaactcctacgggaggcagcagttagggatattcgtcaatgggggaaaccctgaacgagcaatgccgcgtgagtgatgacggtcctatggattgtaaaactctgttgtaaaggaagaatccttattataggta

SEQ ID NO: 7555 - DNA, 490 bp, unidentified
  misc_feature 1..490: note = Ascusbbf_34954, encodes 16S rRNA
  source 1..490: mol_type = genomic DNA
agagtttgatcatggctcaggatgaacgctagcggcaggcttaacacatgcaagtcgaggggcagcgtggagtagcaatactctgacggcgaccggcgaaagggtgagtaacgcgtgagcaacatgcccggtagagagggatagtcattggaaacgatgcgtaatacctcgtaacacacggaagcgcatgattctgtgttgaaagattaatcgctaccggattggctcgcgtgccattagctagttggcggggtaacggcccaccaaggcgacgatggctaggggttctgagaggaaggtcccccacattggaactgagacacggtccagactcctacgggaggcagcagtgaggaatattggtcaatggccgagaggctgaaccagccatgccgcgtgcgggaggacggccctatgggttgtaaaccgcttttgtcagggagcaataaggtccacgtgtggactgatgagagtacctggcgaataagca

SEQ ID NO: 7556 - DNA, 490 bp, unidentified
  misc_feature 1..490: note = Ascusbbf_7008, encodes 16S rRNA
  source 1..490: mol_type = genomic DNA
agagtttgatcatggctcaggatgaacgctggcggcatgcctaatacatgcaagtcgaacgggagtgcttgcactccagtggcgaacgggtgagtaatacataggtaacctgtccttaagacgaggatagcttctagaaatggaagataaaactggataggacatcacaaatcacatgattagatgtttaaaagagcaatctacttaaggaggggcctgtggcgcattagccagatggcggggtaatggcccaccatagcgatgatgcgtagccggtctgagaggacgaacggccacattgggactgagacacggcccagactcctacgggaggcagcagtagggaattttcggcaatgggcggaagcctgaccgagcaatgccgcgtgaatgaagaagtatttcggtatgtaaagttcttttatttgggacgaaaaaacaaattgacggtaccaaatgaataagccccggctaactatgtgccagcagc

SEQ ID NO: 7557 - DNA, 490 bp, unidentified
  misc_feature 1..490: note = Ascusbbf_63443, encodes 16S rRNA
  source 1..490: mol_type = genomic DNA
agagtttgatcctggctcaggatgaacgctagcgacaggcctaacacatgcaagtcgaggggcagcggggagaaagcttgctttttctgccggcgaccggcgcacgggtgcgtaacaggtgtgcaatctgtccataatcggggaatagcccggcgaaagccgaattaaagctccatgtgccattgaggggcatcccatgatggtgaaacgttaaggattatggatgagcacgcttctgattaggtagttggtgaggtaacggcccaccaagccgacgatcagtaggggttctgagaggaaggtcccccacattggaactgagacacggtccaaactcctacgggaggcagcagtgaggaatattggtcaatggacgagagtctgaaccagccaagtcgcgtgaaggaagacggttctatggattgtaaacttcttttgtccgagggtaaagttaggtacgtgtacctattggaaagtatcggacgaataa

SEQ ID NO: 7558 - DNA, 490 bp, unidentified
  misc_feature 1..490: note = Ascusbbf_62513, encodes 16S rRNA
  source 1..490: mol_type = genomic DNA
agagtttgatcctggctcaggatgaacgctggcggcgtgcttaacacatgcaagtcgaacggaaacttaatgaaacctagtgatttaagttttagtggcggacgggtgagtaacgcgtgggtaacctgccgtatgcagggggataacagttagaaatgactgctaataccgcataagaccacagtctcgcatgagacaggggtaaaaactccggtggcatacgatggacccgcgtctgattaggcagttggtgaggtaacggcccaccaaacctacgatcagtagccggcctgagagggtgaacggccacattgggactgagacacggcccaaactcctacgggaggcagcagtggggaatattgcacaatgggcgaaagcctgatgcagcgacgccgcgtgagtgaagaagtatttcggtatgtaaagctctatcagcagggaagaaaatgacggtacctgactaagaagcaccggctaaatacgtgcc

SEQ ID NO: 7559 - DNA, 490 bp, unidentified
  misc_feature 1..490: note = Ascusbbf_1870568, encodes 16S rRNA
  source 1..490: mol_type = genomic DNA
agagtttgatcatggctcaggatgaacgctggcggcgtgcttaacacatgcaagtcgaggggcagcgggtgtagcaatacatgccggcgaccggcgaaagggtgagtaacgcgtgagcaacgtgcccgtatgtggggatagtcattggaagcgatgcgtaataccccgtaacacaagggactgcatggtcctttgttgaaagattttattgcatacggatcggctcgcgtgccattaggtagacggcggggtaacggcccaccgtgccgacgatggctaggggttctgagaggaaggtcccccacattggaactgagacacggtccagactcctacgggaggcagcagtgaggaatattggacaatggccggaaggctgatccagccatgccgcgtgcgggatgacggccctatgggttgtaaaccgcttttgcgagggggcaataagggtcacgcgtggcccgatgagagtacctcgcgaataagcatc

SEQ ID NO: 7560 - DNA, 490 bp, unidentified
  misc_feature 1..490: note = Ascusbbf_145042, encodes 16S rRNA
  source 1..490: mol_type = genomic DNA
agagtttgatcctggctcaggatgaacgctggcggcgtgcctaacacatgcaagtcgagcggagaggttgcggagattcaatcgatgatctgcttcttcttagcggcggatgggtgagtaacacgtgggtaacctgccctgcactggggaataacagttggaaacgactgttaataccgcatatgcgcacggggtcgcatgaccccgggcggaaagatttatcggtgcaggatgggcccgcgtcggattaacttgttggtgaggtaatggcccaccaaggtgatgatccgtagccgacctgagagggtgaccggccacattgggactgagacacggcccaaactcctacgggaggcagcagtgggggatattgcacaatgggcgcaagcctgatgcagcgacgccgcgtgaaggaagacgtatttcggtatgtaaacttctatcagcggggaagaagatgacggtacccgactaagaagccccggctaat

SEQ ID NO: 7561 - DNA, 490 bp, unidentified
  misc_feature 1..490: note = Ascusbbf_159592, encodes 16S rRNA
  source 1..490: mol_type = genomic DNA
agagtttgatcctggctcaggatgaacgctggcggcgtgcctaacacatgcaagtcgaacgaagctcctgcgacagattccttcgggatgaagatgcttgagacttagtggcggacgggtgagtaacgcgtgggtaacctgccctgtactgggggacaacagttagaaatgactgctaataccgcataagcctacagagtcgcatgacttagtaggaaaaattccggtggtacaggatgggcccgcgtctgattagctagttggtgaggtaacggctcaccaaggcgacgatcagtagccggcttgagagagtgaacggccacattgggactgagacacggcccaaactcctacgggaggcagcagtggggaatattgcacaatgggggaaaccctgatgcagcaacgccgcgtgagtgaagaagtatttcggtatgtaaagctctatcagcagggaagaaaatgacggtacctgactaagaagcaccgg

SEQ ID NO: 7562 - DNA, 490 bp, unidentified
  misc_feature 1..490: note = Ascusbbf_118593, encodes 16S rRNA
  source 1..490: mol_type = genomic DNA
agagtttgatcatggctcaggattaacgctggcggcgtgcctaacacatgcaagtcgagcgagaaatagtgaagagatacttcggttgaacagatctatggacagcggcggacgggtgagtaacgcgtgggcaacctacccctttcccgaggatagccaagggaaactttgaataatactccataaagcagatgtaccgcatgatacgactgccaaagatttatcggagagggatgggcccgcgtctgattagccagttggtgaggcagcggctcaccaaagcgacgatcagtagccggcctgagagggtgaacggccacattggaactgagacacggtccagactcctacgggaggcagcagtggggaatattgcacaatgggcggaagcctgatgcagcaacgccgcgtgaaggatgaaggttttcggatcgtaaacttctgtccctggggaagaagaaagtgacggtacccaaggaggaagccccgg

SEQ ID NO: 7563 - DNA, 490 bp, unidentified
  misc_feature 1..490: note = Ascusbbf_186150, encodes 16S rRNA
  source 1..490: mol_type = genomic DNA
agagtttgatcatggctcaggatgaacgctagcggcaggcctaacacatgcaagtcgagcgggattcggtggcttgccaccgatgagagcggcgcacgggtgcgtaacgcgtatacaacctgccttttgctacgggatagcccagagaaatttggattaacaccgtatggtatagagtcccggcatcgggcttctattaaaggctacggcaaaagatgggtatgcgtcctattagctagatggtgtggtaacggcataccatggcgacgataggtaggggccctgagagggggatcccccacactggtactgagacacggaccagactcctacgggaggcagcagtgaggaatattggacaatgggcggaagcctgatccagccatgccgcgtgcaggaagactgccctatgggttgtaaactgcttttatacgggaagaaacaccccctcgtgagggggcttgacggtaccgtaggaataaggatcggc

SEQ ID NO: 7564 - DNA, 490 bp, unidentified
  misc_feature 1..490: note = Ascusbbf_1515609, encodes 16S rRNA
  source 1..490: mol_type = genomic DNA
agagtttgatcctggctcaggatgaacgctggcggcgcgcctaacacatgcaagtcgaacggttaagccaccttcgggtgggaataaagtggcgaacggctgagtaacacgtgggcaacctgcccctcgcaccgggacagcctcgggaaaccgtggatgataccggatactccgcctcccccgcatggggagggcgggaaagcccagacggcgagggatgggcccgcggcctgttagctagttggcggggcagcggcccaccaaggcgatgatgggtagccgggttgagagaccgaccggccacattggaattgggaaacggaccaaactcctacgggaggcagcagtggggaatattgcacaatgggggaaactctgatgcagccatgccgcgtgtgtgaagaaggccttcgggttgtaaagcactttcggaggggaggaacaaatgacgttaccctcagaagaagcaccggctaactccgtgccagca

SEQ ID NO: 7565 - DNA, 490 bp, unidentified
  misc_feature 1..490: note = Ascusbbf_718469, encodes 16S rRNA
  source 1..490: mol_type = genomic DNA
agagtttgatcatggctcagaatgaacgctggcggcatggattaggcatgcaagtcgaacgggaaggccttcgggccttcgagtggcgaaagggtgagtaacacgtgagcaacctgcccccgagttccgaataagcagtggaaacgctgtctaatgcgggatgaggagaacttgtctcctgacaatatctccaaagatttatcgcttggggatgggctcgcggcccattagcttgttggtggggtaatggcccaccaaggctacgacgggtaggtggactgagaggtcggtcacccacactgggactgagacactgcccagactcctacgggaggctgcagtcgagaatcttccgcaatgggcgcaagcctgacggagcaatgccgcgtgagggaagaaggccttcgggttgtaaacctctgtcgcctgggacgaaaacaatgacggtaccaggagaggaagtcacggctaactacgtgccagcagccgc

SEQ ID NO: 7566 - DNA, 490 bp, unidentified
  misc_feature 1..490: note = Ascusbbf_486594, encodes 16S rRNA
  source 1..490: mol_type = genomic DNA
agagtttgatcatggctcaggacgaacgctggcggcgtgcttaacacatgcaagtcgaacggagcacccctgactgaggcttcggccaaatgaagggaatgcttagtggcggacgggtgagtaacgcgtgagtaacctgcctttcagagggggacaacagttggaaacgactgctaataccgcataacatgtacggaccgcatgatctgtacatcaaagatttatcgctgaaagatggactcgcgtctgattagctagttggcggggtaacggcccaccaaggcgacgatcagtagccggactgagaggttgaacggccacattgggactgagatacggcccagactcctacgggaggcagcagtggggaatattgggcaatgggcgcaagcctgacccagcaacgccgcgtgaaggaagaaggctttcgggttgtaaacttcttttctcagggaagatgaacagactgtacctgaggaataagccacgg

SEQ ID NO: 7567 - DNA, 490 bp, unidentified
  misc_feature 1..490: note = Ascusbbf_359769, encodes 16S rRNA
  source 1..490: mol_type = genomic DNA
agagtttgatcctggctcaggatgaacgctggcggcgtgcctaatacatgcaagtcgaacgagggtgcttgcaccctagtggcgaacgggtgagtaacacgtaggtaacctgcctttaagcttgggatacccagaggaaactttggctaataccggataacaacatttgaggcatctcagatgtttgaaaggccctttacggggtcacttaaagatggacctgcggcgcattagttagttggtgagataacagcccaccaagacgaggatgcgtagccgacctgagagggtgatcggccacattggaactgagacacggtccaaactcctacgggaggcagcagtaaggagttttcggcaatgggggaaaccctgaccgagcaacgccgcgtgagcgatgacggccctatgggttgtaaagctctgttgtaagggaagaatgatccgcttaggaaatgaagtgggtttgacggtaccttaccagaaagcc

SEQ ID NO: 7568 - DNA, 490 bp, unidentified
  misc_feature 1..490: note = Ascusbbf_488523, encodes 16S rRNA
  source 1..490: mol_type = genomic DNA
agagtttgatcctggctcaggatgaacgctggcggcgtgcctaatacatgcaagtcgaacgagggtgcttgcaccctagtggcgaacgggtgagtaacacgtaggtaacctgccttccagtttgggatacccagaggaaactttggctaataccgaataactgatttagaggcatctctagattctaaaaggggctccaaagcctcgctgaaagatggacctgcggcgcattagctagttggtgagataacagcccaccaaggcgaggatgcgtagccgacctgagagggtgaacggccaaactggaactgagacacggtccagactcctacgggaggcagcagtagggagttttcggcaatgggggaaaccctgaccgagcaacgccgcgtgagcgatgaaggccttcgggttgtaaagctctgttgtaagggaagaacggtacggtgaggaaatgctccgtatttgacggtaccttattagaaagcca

SEQ ID NO: 7569 - DNA, 490 bp, unidentified
  misc_feature 1..490: note = Ascusbbf_175836, encodes 16S rRNA
  source 1..490: mol_type = genomic DNA
agagtttgatcctggctcaggacgaacgctggcggcgtgcttaacacatgcaagtcgagcggaaaggcccttttttgggtactcgagcggcgaacgggtgagtaacacgtgggtaacctgcccctggcttcagaataactccgagaaatcggggctaatgctggatatgacgcgtgaccgcatggtgtgcgcgtggaaagatttggttcggttggggatggactcgcggcctatcagtttgttggtggggtagtggcctaccaaggcttcgacgggtagccggcctgagagggtgaccggtcacactgggactgagacacggcccagactcctacgggaggcagcagtggggaatattgcgcaatgggcggaagcctgacgcagcaacgccgcgtgagggatgacggccttcgggttgtaaacctctttcagctccgacgaagccctgtggggtgactgtaggggcagaagaagcaccggctaactacgt

SEQ ID NO: 7570 - DNA, 490 bp, unidentified
  misc_feature 1..490: note = Ascusbbf_93466, encodes 16S rRNA
  source 1..490: mol_type = genomic DNA
agagtttgatcctggctcaggatgaacgctagcggcaggcctaatacatgcaagtcggacggtaagcgccccttcgggggcgcgagagtggcgcacgggtgcgtaacgcgtatgcaaccagccccgtccaggcggatagccggtggaaacgccggataatacgccacggtcccggaggggggcatccctttccgggtgaagcggagacgcgggacgggacgggcatgcgtgccattagctagttggcggggcgacggcccaccaaggctgcgatggctaggggatctgagaggacggtcccccacactggtactgagacacggaccagactcctgcgggaggcagcagtaagggatattggtcaatggggggaaccctgaaccagccatgccgcgtgagggaatgaggccctacgggtcgtgaacctcttttattcggggacaacggcggcgtcgagaacgccgcgtgagggtaccgaaggaataagcgt

SEQ ID NO: 7571 - DNA, 490 bp, unidentified
  misc_feature 1..490: note = Ascusbbf_12311, encodes 16S rRNA
  source 1..490: mol_type = genomic DNA
agagtttgatcatggctcaggatgaacgctggcggcgtgcctaacacatgcaagtcgaacggagattcattggaaataagcttcggcagaaataagatggatcttagtggcggacgggtgagtaacgcgtggagaacctgccctgtacagggggataacatccagaaatggatgctaaaaccgcataagcgcacatgaccgcatggtcaagtgtgaaaaactccggtggtacaggatggctccgcgttggattagccagttggcggggtaacggcccaccaaagcgacgatccatagccggcctgagagggtgaacggccacattgggactgagacacggcccagactcctacgggaggcagcagtggggaatattgcacaatggggggaaccctgatgcagcgacgccgcgtgaaggaagaagtatttcggtatgtaaacttctatcagcagggaagaaaatgacggtacctgactaagaagccccggc

SEQ ID NO: 7572 - DNA, 490 bp, unidentified
  misc_feature 1..490: note = Ascusbbf_62919, encodes 16S rRNA
  source 1..490: mol_type = genomic DNA
agagtttgatcctggctcaggatgaacgctagcggcaggcttaacacatgcaagtcgaggggcagcgcggggtagcaataccctggcggcgaccggcgcacgggtgcgtaacgcgtatgcaacctgcccgcaacagggggataacggagagaaatctccactaataccccgtattgtcagacttccgcatgggggtctgacgaaagcttcggcggttgcggatgggcatgcgtggcattaggtagttggcggggcaacggcccaccaagcccacgatgcctaggggagctgagaggcttatcccccacactggtactgagacacggaccagactcctacgggaggcagcagtgaggaatattggtcaatggagggaactctgaaccagccatgccgcgtgcgggaagaaggccctatgggttgtaaaccgcttttaaccgggagtaataagggccgtgcgcggtccgatgagagtaccggtggaataagc

SEQ ID NO: 7573 - DNA, 490 bp, unidentified
  misc_feature 1..490: note = Ascusbbf_144394, encodes 16S rRNA
  source 1..490: mol_type = genomic DNA
agagtttgatcctggctcaggacgaacgctggcggcgtgcctaacacatgcaagtcgaacgaagtttaaattagagcttgctctggcttaaacttagtggcggacgggtgagtaacgcgtgagcaacctgcctttttgagggggataacaccgggaaaccggtgctaataccgcataacatatcgaggtcgcatggctttgatatcaaaggagcaatccgcaaaaagatgggctcgcgtccgattagctagttggtggggtaaaagcctaccaaggcgacgatcggtagccggactgagaggttgaacggccacattgggactgagacacggcccagactcctacgggaggcagcagtgggggatattgcacaatgggggaaaccctgatgcagcaacgccgcgtgagggaagaaggttttcggattgtaaacctctgtcctaggtgaagaaagaaatgacggtagcctgggaggaagctccggctaact

SEQ ID NO: 7574 - DNA, 490 bp, unidentified
  misc_feature 1..490: note = Ascusbbf_134625, encodes 16S rRNA
  source 1..490: mol_type = genomic DNA
agagtttgatcatggctcaggatgaacgctggcggcgtgcctaatacatgcaagtcgaacgagatggatgagagcttgctctttgaagtctagtggcgaacgggtgagtaacacgtaggtaacctgcctttcagtttgggatacccaggggaaactttggctaataccaaattattacattcaaggcatcttgagtgtctaaaaggggcctttaaagcctcgctgatcgatggacctgcggcgcattagttagttggtgagataacagcccaccaagacgaggatgcgtagccgacctgagagggtgaacggccacactggaactgagacacggtccagactcctacgggaggcagcagtagggagttttcggcaatgggggaaaccctgaccgagcaacgccgcgtgaacgatgaaggtcttcggattgtaaagttctgttgtgagggaaaaatgataccatgaggaaatgcttggtgtttgatggtac

SEQ ID NO: 7575 - DNA, 490 bp, unidentified
  misc_feature 1..490: note = Ascusbbf_73215, encodes 16S rRNA
  source 1..490: mol_type = genomic DNA
agagtttgatcatggctcaggatgaacgctagcggcaggcctaacacatgcaagtcgaggggcagcggggtgtagcaatacaccgccggcgaccggcgcacgggtgcgtaacgcgtatgcaacctgcccgcgacagggggataacgctgtgaaagcggcactaataccccgtaacacccggggccgcatggccttgggttgaaaggagagatccggtcgcggatgggcatgcgtgacattagctagttggcggggcaacggcccaccaaggctgcgatgtctaggggagctgagaggctaatcccccacactggtactgagacacggaccagactcctacgggaggcagcagtgaggaatattggtcaatggtcggaagactgaaccagccatgccgcgtggaggaagaaggccctacgggtcgtaaacttcttttgcccgggagtaataagcggggtgcgccccgcgatgagagtaccgggcgaataag

SEQ ID NO: 7576 - DNA, 490 bp, unidentified
  misc_feature 1..490: note = Ascusbbf_109552, encodes 16S rRNA
  source 1..490: mol_type = genomic DNA
agagtttgatcatggctcaggatgaacgctggcggcgtgcataacacattcaagtcgaacggacttatcggcttcggtcggtaagttagtggcggacgggtgagtaacgcgtgagcaacctgcccctgtgtgtgggataacgtttggaaacgaacgctaataccgcatgacccaatagaaccgcatggttcagttggcaaagatttattgcacagggatgggctcgcgtccgattagatagttggcggtgtaacggaccaccaagtcgacgatcggtagccggactgagaggttgaacggccacattggaactgagaaacggtccagactcctacgggaggcagcagtggggaatattgggcaatgggcgaaagcctgacccagcgacgccgcgtgaaggaagacggtcctcggattgtaaacttcttttatgtaggacgaaagcaatgacggtactacatgaataagccacggctaactacgtgccagc

SEQ ID NO: 7577 - DNA, 490 bp, unidentified
  misc_feature 1..490: note = Ascusbbf_98749, encodes 16S rRNA
  source 1..490: mol_type = genomic DNA
agagtttgatcatggctcaggatgaacgctagctacaggcttaacacatgcaagtcgcggggcagcgcgttgcagcaatgcgatggcggcgaccggcgcacgggtgagtaacgcgtatccgacctgtcccttactccgggatagccccccgaaagggggattaatacgggatgtgctgctggggttacatggttccggcagtaaaggagcgatccggtaagggttggggatgcgtcccattaggaagttggcggggtaacggcccaccaatcctgcgatgggtaggggtactgagaggtaggtcccccacactggaactgagacacggtccagactcctacgggaggcagcagtgaggaatattggtcaatgggcgcaggcctgaaccagccaagtagcgtggaggaggaatgccctacgggttgtaaactccttttccgggagggtaacgtgcggcacgcgtgccgtattgcaagtatcccgggaataa

SEQ ID NO: 7578 - DNA, 490 bp, unidentified
  misc_feature 1..490: note = Ascusbbf_383921, encodes 16S rRNA
  source 1..490: mol_type = genomic DNA
agagtttgatcctggctcaggatgaatgctggcggcgtgcctaatacatgcaagtcgagcggtaacagggcttcaccgtttccttgacacacttggcctgagtgcaagtggttggatttcgagggaacagtgaagctgctgacgagcggcggacggctgagtaacgcgtgggaacggaccccaaactgagggataactactcgaaagagtggctaataccgcatgtgatcttcggattaaaggatttatccggtttgggactggcctgcgtacgattagatagttggtagggtaatggcctaccaagtcgacgatcgttagatggtttgagaagatgatcatccagactgggactgagacacggcccagactcctacgggaggcagcagtagggaatctttcacaatgggcgaaagcctgatggagcaacgccgcgtgcaggatgacggccttcgggttgtaaactgcttttataagcgagaaatatgat

SEQ ID NO: 7579 - DNA, 490 bp, unidentified
  misc_feature 1..490: note = Ascusbbf_235604, encodes 16S rRNA
  source 1..490: mol_type = genomic DNA
agagtttgatcctggctcaggatgaacgctagcggcaggcttaacacatgcaagtcgaggggcagcgagatgtagtaatacattgtcggcgaccggcgcacgggtgcgtaacgcgtatgcaacctaccatatacaggggaataacctttcgaaagggagactaataccccatagtattacaataaggcatcttattgtaattaaagatttattggtatatgatgggcatgcgtgccattagttagttggtgaggtaacggctcaccaagacaacgatggctaggggttctgagaggaagaccccccacactggtactgagacacggaccagactcctacgggaggcagcagtgaggaatattggtcaatggacggaagtctgaaccagccatgccgcgtgcaggaagacggccctacgggttgtaaactgcttttatgtgagaataaccctagtcttgcgagattagctgaaggtatcacatgaataagg

SEQ ID NO: 7580 - DNA, 490 bp, unidentified
  misc_feature 1..490: note = Ascusbbf_676219, encodes 16S rRNA
  source 1..490: mol_type = genomic DNA
agagtttgatcatggctcaggacgaacgctggcggcgtgcctaacacatgcaagtcgagcgatgaaaattggagcgttcccttcggggaacaatccgattggattagcggcggacgggtgagtaacacgtgagtaacctgccgtacacattgggatagcctcgggaaactgggattaataccaaatgaaacatacagatagcattatctaaatgtcaaagattttatcggtgtacgatggactcgcgtctgattagctagttggtaaggtaacggcttaccaaggcgatgatcagtagccggcctgagagggtgatcggccacattgggactgagacacggcccaaactcctacgggaggcagcagtggggaatattgcacaatggaggaaactctgatgcagcgacgccgcgtgagcgaagaagggattcgtctcgtaaagctctgtcctatgggaagataatgacggtaccatagaagaaagccccgg

SEQ ID NO: 7581 - DNA, 490 bp, unidentified
  misc_feature 1..490: note = Ascusbbf_403482, encodes 16S rRNA
  source 1..490: mol_type = genomic DNA
agagtttgatcctggctcaggacgaacgctggcggcgtgcttaacacatgcaagtcgaacgctgaagcccttcggggtggatgagtggcggacgggtgagtaacacgtgggtaatctgccctgtactctgggataagcctcggaaacggggtctaataccggataggacatcgcctcgcatggggtggtgtggaaagttccggcggtatgggatgagcccgcggtctatcagcttgatggtggggtgatggcctaccatggcgacgacgggtagccggcctgagagggtgaccggccacactgggactgagacacggcccagactcctacgggaggcagcagtggggaatcttgcgcaatgggcgaaagcctgacgcagcaacgccgcgtgagggaggacggccttcgggttgtaaacctctttcgacaccgacgaaggccctcacgtgtgggggtggacggtaggtgtagaagaagcaccggctaacta

SEQ ID NO: 7582 - DNA, 490 bp, unidentified
  misc_feature 1..490: note = Ascusbbf_571474, encodes 16S rRNA
  source 1..490: mol_type = genomic DNA
agagtttgatcatggctcaggacgaacgctggcggcgtgcttaacacatgcaagtcgaacgcgccatctttgggtggtgagtggcgaacgggtgagtaacacgtgagtaacctgcccctggctctgggataagccgtggaaacgcggtctaataccggatgtgaccttctgccgcatggtggggggtggaaagggtttctggttggggatgggctcgcggcctatcagcttgttggtggggtgatggctcaccaaggcgattacgggtagccggcctgagagggcgaccggccacactgggactgagacacggcccagactcctgcgggaggcagcagtggggaatattgcgcaatgggcgaaagcctgacgcagcgacgccgcgtgggggatgacggccttcgggttgtaaacctcttttctttccgatgaaggctctggctgttgttggggttgactaggggaggaataaggaccggctgactacgtg

SEQ ID NO: 7583 - DNA, 490 bp, unidentified
  misc_feature 1..490: note = Ascusbbf_80980, encodes 16S rRNA
  source 1..490: mol_type = genomic DNA
agagtttgatcatggctcaggatgaacgctagcgacaggcttaacacatgcaagtcgaggggcatcgggggagtggcaacactcctgccggcgaccggcgcactggtgagtaacacgtatgcgacctgccccgcacagggggataatccgtggaaacgcggtctaataccccgtagtaccgtgggctgcatggttcacggtggaaagtggcgacacggtgcgggatgggcatgcggcgcattagcttgttggtggggcaacggcccaccaaggcgacgatgcgtaggggttctgagaggaaggtcccccacactggtactgagacacggaccagactcctacgggaggcagcagtgaggaatattggtcaatggacggcggtctgaaccagccaagtcgcgtgagggaaggaggccctacgggtcgtaaacctcttttgccggggagcaacgtgcgggacgtgtcccgcagtgagagtacccggagaaaa

SEQ ID NO: 7584 - DNA, 490 bp, unidentified
  misc_feature 1..490: note = Ascusbbf_646032, encodes 16S rRNA
  source 1..490: mol_type = genomic DNA
agagtttgatcatggctcaggatgaacgctagcggcaggcttaacacatgcaagtcgaggggcagcgcggggtagcaatactctggcggcgaccggcggatgggtgagtaacgcgtatgtaatctgcctgtgacaggaggataacccgacgaaagtcggactaatactccataagaccacgtgggggcatccccgaggggtaaaaggcttcggccggtcacagatgaacatgcgttccattagctagttggtggggtcacggctcaccaaggcgacgatggataggggttctgagaggaagatcccccacattgggactgagacacggcccaaactcctacgggaggcagcagtgaggaatattggtcaatgggcggaagcctgaaccagccatgccgcgtgaaggatgacggccttatgggttgtaaacttcttttatgtgggagcaataaggcgcacgtgtgcgctgatgagagtaccacaggaataa

SEQ ID NO: 7585 - DNA, 490 bp, unidentified
  misc_feature 1..490: note = Ascusbbf_1372864, encodes 16S rRNA
  source 1..490: mol_type = genomic DNA
agagtttgatcctggctcaggatgaacgctggcggcgtgcttaacacatgcaagtcaaacggagttatctcgctgaggagagcttactcaaatcttgagataacttagtggcggacgggtgagtaacgcgtggataacctgccttatactgggggataacacttagaaataggtgctaataccgcataagcgcacgttcccgcatgggaaagtgtgaaaaactccggtggtgtaagatggatccgcgtctgattagatagttggtgaggtaacggcccaacaagtcaacgatcagtagccgtcatgaggtgggcaacgacaccattgggactgggacacggcccaaactcctacgggaggcagcagtggggaatattgcacaatgggggaaaccctgatgcagcgacgccgcgtgagtgaagaagtatttcggtatgtaaagctctatcagcaaggaagaaaaaaatgacggtacttgactaagaagccc

SEQ ID NO: 7586 - DNA, 490 bp, unidentified
  misc_feature 1..490: note = Ascusbbf_1482970, encodes 16S rRNA
  source 1..490: mol_type = genomic DNA
agagtttgatcctggctcaggatgaacgctggcggcgtgcctaacacatgcaagtcgagcgagaaggaggaagcttgcttccaaattctagcggcggacgggtgagtaacgcgtgggcaacctaccctgtacagggggataacaatgggaaaccattgctaataccccataacaccttctaggggcatcccttaaaggtcaaagaatttcggtataggatgggcccgcgtctgattagctagttggtgaggtaatggctcaccaaggcgacgatcagtagccggcctgagagggtgaacggccacactggaactgagacacggtccagactcctacgggaggcagcagtggggaatattgcacaatgggcgaaagcctgatgcagcaacgccgcgtgagcgatgaaggctttcgggtcgtaaagctctgtcctaagggaagataatgacggtaccttaggaggaagccccggctaactacgtgccagcag

SEQ ID NO: 7587 - DNA, 490 bp, unidentified
  misc_feature 1..490: note = Ascusbbf_174325, encodes 16S rRNA
  source 1..490: mol_type = genomic DNA
agagtttgatcatggctcaggatgaacgctagcggcaggcttaacacatgcaagtcgaggggcagcgggtgtagcaatacatgccggcgaccggcgaaagggtgagtaacgcgtgagcaacatgcccgatactgggggatagtcattggaaacgatgcgtaataccccgtaacacaaatcttcgcatgggggtttgttgaaagattgattggtatcggattggctcgcgtgccattaggtagacggcggggtaacggcccaccgtgccgacgatggctaggggttctgagaggaaggtcccccacattggaactgagacacggtccagactcctacgggaggcagcagtgaggaatattggacaatggccggaaggctgatccagccatgccgcgtgcgggatgacggccctatgggttgtaaaccgcttttgcgggggagcaataatcactacgagtagtgagatgagagtaccctgcgaataagcatc

SEQ ID NO: 7588 - DNA, 490 bp, unidentified
  misc_feature 1..490: note = Ascusbbf_192195, encodes 16S rRNA
  source 1..490: mol_type = genomic DNA
agagtttgatcatggctcaggacgaacgctggcggcgtgcctaacacatgcaagtcgagcggggatgcagggaacggaagctacggcggaagggagctggatttcagcggcggacgggtgagtaacgcgtgaacaatctgtcccggacagggggataacacttggaaacaggtgctaataccgcataagaccacagcgccgcatggcggaggggtcaaaggagagatccggttcggggtgagttcgcgtctgattagctagttggtgaggtaacggcccaccaaggcgacgatcagtagccgacctgagagggtgatcggccacattggaactgagacacggtccaaactcctacgggaggcagcagtgggaatattgggcaatgggcgaaagcctgacccagcaacgccgcgtgagggaagaaggttttcggattgtaaacctctgttgtggatgacgaaggaagtgacggtaatccacaaggaagccc

SEQ ID NO: 7589 - DNA, 490 bp, unidentified
  misc_feature 1..490: note = Ascusbbf_225902, encodes 16S rRNA
  source 1..490: mol_type = genomic DNA
agagtttgatcctggctcaggatgaacgctagcggcaggcctaacacatgcaagtcgagcgggattcggtggcttgccaccgatgagagcggcgcacgggtgcgtaacgcgtatgcaacctaccttttgctacgggatagcccagggaaacttggattaataccgtatagtatacgttccccccatggggtccgtattaaaggctacggcaaaagatgggcatgcgtcctattagctagatggtgtggtaacggcataccatggcaacgataggtaggggccctgagagggggatcccccacactggtactgagacacggaccagactcctacgggaggcagcagtgaggaatattggacaatgggcggaagcctgatccagccatgccgcgtgcaggaagactgccctatgggttgtaaactgcttttatacgggaagaaacaccccctcgtgagggggcttgacggtaccgtaggaataaggatcggc

SEQ ID NO: 7590 - DNA, 490 bp, unidentified
  misc_feature 1..490: note = Ascusbbf_408549, encodes 16S rRNA
  source 1..490: mol_type = genomic DNA
agagtttgatcctggctcaggatgaacgctagcggcaggcctaacacatgcaagtcgaggggcagcacggtgtagcaatacactggtggcgaccggcgcacgggtgcgtaacgcgtatgcaacctacccataacagggggataacactgagaaattggtactaataccccataacatcaggaccggcatcggttctggttgaaaactccggtggttatggatgggcatgcgttgtattagctggttggtgaggtaacggctcaccaaggcaacgatacatagggggactgagaggttaaccccccacattggtactgagacacggaccaaactcctacgggaggcagcagtgaggaatattgatcaatggacgcaagtctgaaccagccatgccgcgtgcaggaagacggctctatgagttgtaaactgcttttgtacgagggtaaacgctcttacgtgtaagagcctgaaagtatcgtacgaataagga

SEQ ID NO: 7591 - DNA, 490 bp, unidentified
  misc_feature 1..490: note = Ascusbbf_213495, encodes 16S rRNA
  source 1..490: mol_type = genomic DNA
agagtttgatcctggctcaggatgaacgctagcgggaggcctaacacatgcaagccgagcggtagaagtccttcgggactttgagagcggcgtacgggtgcgtaacacgtgtgcaacctacctttatctggggaatagcctttcgaaaggaagattaacaccccataatataatgattggcatcaattattattgaaaactccggtggatagagatgggcacgcgcaagattagatagttggtgaggtaacggctcaccaagtctgtgatctttaggggtcctgagagggagatcccccacactggtactgagacacggaccagactcctacgggaggcagcagtgaggaatattggacaatgggtgaaagcctgatccagccatcccgcgtgaaggatgacggtcctatggattgtaaacttcttttgtacaggaataaacctactctcgtgagagtagctgaaggtactgtacgaataagcaccggct

SEQ ID NO: 7592 - DNA, 490 bp, unidentified
  misc_feature 1..490: note = Ascusbbf_938, encodes 16S rRNA
  source 1..490: mol_type = genomic DNA
agagtttgatcatggctcaggatgaacgctagcggcaggcttaacacatgcaagtcgaggggcagcacgggtggcaacacctggtggcgaccggcgcaagggtgcgtaacgcgtgagcaacatgcccgtaacagagggataaccggtggaaacgccgactaatacctcataaggatacatgacggcatcgtcgagtatctaaacctacgggggttacggattggctcgcgagacattaggtagacggcggggtaacggcccaccgtgccgacgatgtctaggggttctgagaggaaggtcccccacactggaactgagacacggtccagactcctacgggaggcagcagtgaggaatattggacaatggccggaaggctgatccagccatgccgcgtgcaggaagacggtcctatggattgtaaactgcttttgtacgagagcaataaggtgtacgtgtacaccgatgagagtatcgtacgaataagcat

SEQ ID NO: 7593 - DNA, 490 bp, unidentified
  misc_feature 1..490: note = Ascusbbf_1341, encodes 16S rRNA
  source 1..490: mol_type = genomic DNA
agagtttgatcctggctcagagttaacgctggcatcgtgcataacacatgcaagtcgaacgggactttgcgctgtagcaatacagtgtaaagtttagtggcagacgggtgagtaatgtataagaaacctacctctgagtggggaataacagtccgaaaggattgctaataccccataacataatgaaaaggcatctttttattatcaaagatttatcgcttggagatggtcttatattctatcagctagttggcagtgtaacggactaccaaggcaacgacggatagccggcctgaaagggcgaccggccacaagggcactgagacacgggccctactcctacgggaggcagcagtggggaattttggacaatgggcgcaagcctgatccagcaacgatgcgtggaggatgaaggttctcggattgtaaactccttttgtaagggaagaaaaaaatgacggtaccttacgaataagccacggctaactac

SEQ ID NO: 7594 - DNA, 490 bp, unidentified
  misc_feature 1..490: note = Ascusbbf_2465, encodes 16S rRNA
  source 1..490: mol_type = genomic DNA
agagtttgatcatggctcaggatgaacgctagcggcaggcttaacacatgcaagtcgaggggcagcgcggagtagcaatactctggcggcgaccggcggaagggtgcgtaacgcgtgagcaacctgcccgtaaccgggacataaccgatggaaacgtcgcctaatttcccataacaactggattggcatcacttcagtttgaaagcttcggtggttacggatgggctcgcgagacattagctggttggtagggtaacggcctaccaaggcgacgatgtctaggggttctgagaggaaggtcccccacactggaactgagacacggtccagactcctacgggaggcagcagtgaggaatattggtcaatgggcggaagcctgaaccagccatgccgcgtgcaggaataaggccctatgggtcgtaaactgcttttgtgcgggagcaataagtattacgtgtaatacgatgagagtaccgtacgaataagca

SEQ ID NO: 7595 - DNA, 490 bp, unidentified
  misc_feature 1..490: note = Ascusbbf_307862, encodes 16S rRNA
  source 1..490: mol_type = genomic DNA
agagtttgatcctggctcagaacgaacgctggcggcgcgtcttaagcatgcaagtcgaatggcaagatagagcttgctctatcctagaatggcggactggtgagtaacgcgtgggtgacgtaccctttagatggggatagctggtagaaatatcagataataccgaataagctgtaactctttagaggggttacaggaaaggatcttttgatccgctgaaggagcggcccgcgtactattagctagttggtgaggtaacggcccaccaaggcgatgatagttacccggcctaagagggtgatcgggaacattgggactgagatacggcccagactcctacgggaggcagcagctaagaatattccgcaatggacgaaagtctgacggagcgacgccgcgtggatgatgaaggccggaaggttgtaaaatccttttaagtgtgaagaataagtagtgtgagagaaacgcattatggtgacggtaacacttg

SEQ ID NO: 7596 - DNA, 490 bp, unidentified
  misc_feature 1..490: note = Ascusbbf_1353580, encodes 16S rRNA
  source 1..490: mol_type = genomic DNA
agagtttgatcatggctcagaacgaacgctggtggcgtgtcttatacatgcaagtcgaggggcatcgtggagtagcaatactctgacggcgaccggcgaaagggtgagtaacgcgtgagcaacatgcccggtaccggaggatagtcgatggaaacgtcgcgtaatactccgtaacatacggaaccgcatgattctgtattgagagatttatcgctaccggattggctcgcgtcccattaggcagttggcggggtaacggcccaccaaaccgacgatgggtaggggttctgagaggaaggtcccccacattggaactgagacacggtccagacccctacgggaggcagcagtgaggaatattggacaatggccgagaggctgatccagccatgccgcgtgcgggaggacggccctatgggttgtaaaccgcttttgtcagggggcaataagggtcacgtgtggactgatgagagtacctggcgaataagca

SEQ ID NO: 7597 - DNA, 490 bp, unidentified
  misc_feature 1..490: note = Ascusbbf_29293, encodes 16S rRNA
  source 1..490: mol_type = genomic DNA
agagtttgatcatggctcaggatgaacgctggcggcaggcttaatacatgcaagtcgaacggtaaggcccgaagtagcaatacggagggtacacgagtggcgcacgggtgcgtaacgcgtatgcaacctgccccgcaccgggacaaaacagctggaaacggctgctaatatcccatagtcacacgagggggcatccctttgtgtgtaaagattcattggtgcgggatgggcatgcgtattattaggtagttggcggggtaacggcccaccaagccgacgatgattaggggtcctgagagggttaacccccacactggaactgagacacggtccagactcctacgggaggcagcagtagggaatattgggcaatggaggaaactctgacccagccatgccgcgtgaaggaagacggccctatgggttgtaaacttcttttgttgcagagtaaacccggccacgcgtggccggctgagagtatgcgacgaat

SEQ ID NO: 7598 - DNA, 490 bp, unidentified
  misc_feature 1..490: note = Ascusbbf_31996, encodes 16S rRNA
  source 1..490: mol_type = genomic DNA
agagtttgatcatggctcaggatgaacgctggcggcgtgcataacacattcaagtcgaacgatgaagggacttcggtcctggaatagtggcggacgggtgagtaacgcgtgagcaacctgccttgcattgggggataacgtttggaaacgaacgctaataccgcataacgtataaatatcgcatgttagatataccaaagatttattgatgcaagatgggctcgcgtccgattagatagttggtgaggtaacggcccaccaagtcgacgatcggtagccggactgagaggttgaacggccacattggaactgagaaacggtccagactcctacgggaggcagcagtggggaatattgggcaatgggcgaaagcctgacccagcgacgccgcgtgagggaagaagatcttcggattgtaaacctctttcagcaaggaagaagaaagtgacggtacttgcagaagaagccacggctaactacgtgccagcag

SEQ ID NO: 7599 - DNA, 490 bp, unidentified
  misc_feature 1..490: note = Ascusbbf_141488, encodes 16S rRNA
  source 1..490: mol_type = genomic DNA
agagtttgatcatggctcaggattaacgctggcggcatgcctaatacatgcaagtcgaatgggaaagcttgcttttccatggcgaacgggtgagtaacacgtaggtaacctaccttaaggacgaggataacctttggaaacgaaggataatactggataggacattacaaagcacatgcttaaatgtttaaaggagcaatccaccataagaggggcctgcggcgcattagctagttggtgaggtaaaggcccaccaaggcgatgatgcgtagctggactgagaggttgaacagccacaatgggactgagaacggcccatactcctacgggaggcagcagtagggaattttcggcaatggacgaaagtctgaccgagcaatgccgcgtgaacgaagaagtatttcggtatgtaaagttcttttatcagggaagaaaaaacaaattgactgaacctgatgaataagctccggctaactacgtgccagcagcc

SEQ ID NO: 7600 - DNA, 490 bp, unidentified
  misc_feature 1..490: note = Ascusbbf_37121, encodes 16S rRNA
  source 1..490: mol_type = genomic DNA
agagtttgatcatggctcaggacgaacgctggcggcatgcctaacacatgcaagtcgaacggagatcagagagcttgctttctgatcttagtggcggacgggtgagtaacgcgtgagcaacctgccctttagtggggaataatgttctgaaaaggacactaataccgcataacgtattgaagccgcatgactttgataccaaaggatttattcgctgaaggatgggctcgcgtccgattagctggttggtggggtaaaggcctaccaaggcgacgatcggtagccggactgagaggttgaacggccacattgggactgagacacggcccagactcctacgggaggcagcagtgggggatattgcgcaatgggggaaaccctgacgcagcaatgccgcgtgaaggacgaaggtcttcggattgtaaacttcttttgtcagggacgaaaaatgacggtacctgacgaataagctccggctaactacgtgcca

SEQ ID NO: 7601 - DNA, 486 bp, unidentified
  misc_feature 1..486: note = Ascusbbf_85133, encodes 16S rRNA
  source 1..486: mol_type = genomic DNA
agagtttgatcctggctcagaacgaacgctggcggcacgcttaacacatgcaagtcgaacggagtaatggagcttgctctattacttagtggcggacgggtgagtaacacgtgggaacatgtccatttgtggtggatagcttcgggaaactgaagataatacagcataagcttgagaaaggaaaggtcgaaagatcgcgaatggggtggcccgcggctgattaggtagttggtggggtaaaggcttaccaagccgatgatcagtagctggtctgagaggatgatcagtcacactggaactgagatacggtccagactcctacgggaggcagcagtggggaatattggacaatgggggcaaccctgatccagcgatgccgcgtgagtgaagaaggttttaggattgtaaagctcttttgacagggaagatgatgacggtacctgtagaataagcaccggctaactctgtgccagcagccgcggtaat

SEQ ID NO: 7602 - DNA, 490 bp, unidentified
  misc_feature 1..490: note = Ascusbbf_160619, encodes 16S rRNA
  source 1..490: mol_type = genomic DNA
agagtttgatcctggctcaggacgaacgctggcggcgtgcttaacacatgcaagtcgaacgaagctgggagaaagatttcttcggaatgaattcttctaagactgagtggcggacgggtgagtaacgcgtgagcaacctgcccttcggagggggatagtgtctggaaacggacagtaataccgcataacgtacagatacggcatcgtgactgtaccaaagatttatcgccgaaggatgggctcgcgtctgattagatagttggtggggtaacggcctaccaagtcgacgatcagtagccggactgagaggttgatcggccacattgggactgagacacggcccagactcctacgggaggcagcagtggggaatattgcacaatgggcgcaagcctgatgcagcaacgccgcgtggaggaagacggttttcggattgtaaactcctgttcttagggaagaagacagtgacggtacctaaggagaaagccac

SEQ ID NO: 7603 - DNA, 490 bp, unidentified
  misc_feature 1..490: note = Ascusbbf_110519, encodes 16S rRNA
  source 1..490: mol_type = genomic DNA
agagtttgatcatggctcaggatgaacgctggcggcgtgcataacacattcaagtcgaacggtgaagtcccttcggggatggagcagtggcggacgggtgagtaacgcgtgagcaacctgccgtacagagggggataacacagggaaacctgtgctaataccgcataacgcatggggatcgcatgttttccatgccaaagagaaattgctgtacgatgggctcgcgtatgattagacagttggcggggtaacggcccaccaaatcaacgatcattagccgaactgagaggttgaacggccacattggaactgagaaacggtccagactcctacgggaggcagcagtggggaatattgggcaatgggcgaaagcctgacccagcgacgccgcgtgagggaagaaggtcttcggattgtaaacctctttcagcagggaagaaggaagtgacggtacctgcagaagaagtcacggctaactacgtgccagcag

SEQ ID NO: 7604 - DNA, 490 bp, unidentified
  misc_feature 1..490: note = Ascusbbf_196595, encodes 16S rRNA
  source 1..490: mol_type = genomic DNA
agagtttgatcatggctcagattgaacgctagcggcatgcttaacacatgcaagtcgaacggtaacaggcctagcttgctaggtgctgacgagtggcggacgggtgagtaacgcgtaggaatctacctaatagtgtggaataacctggggaaacccaggctaataccgcatgtgccctaaggggtaaagcaggggactgtaaaaggccttgcgctatttgatgagcctgcgtcggattagctagttggtggggtaaaggcctaccaaggcgatgatccgtagctggtctgagaggacgaccagccacactgggactgagacacggcccagactcctacgggaggcagcagtggggaatattggacaatgggcgcaagcctgatccagcaatgccgcgtgtgtgaagaaggcctgcgggttgtaaagcactttcagtagggaggaaggcttcattgttaataacaatgaagattgacgttacctacagaag

SEQ ID NO: 7605 - DNA, 490 bp, unidentified
  misc_feature 1..490: note = Ascusbbf_265617, encodes 16S rRNA
  source 1..490: mol_type = genomic DNA
agagtttgatcctggctcaggatgaacgctagcggcaggcttaacacatgcaagtcgaggggcagcacgaggtagcaatactttggtggcgaccggcgcacgggtgcgtaacgcgtatgcaacctacctttaacaggggcataacactgagaaattggtactaattccccataacattcgagaaggcatcttcttgggttaaaaactccggtggttaaagatgggcatgcgttgtattagctagttggtgaggtaacggctcaccaaggcaacgatacatagggggactgagaggttaaccccccacattggtactgagacacggaccaaactcctacgggaggcagcagtgaggaatattggtcaatggacgcaagtctgaaccagccatgccgcgtgcaggaagacggctctatgagttgtaaactgcttttgtactagggtaaacgcttctacgtgtaggagcctgaaagtatagtacgaataagga

SEQ ID NO: 7606 - DNA, 490 bp, unidentified
  misc_feature 1..490: note = Ascusbbf_118935, encodes 16S rRNA
  source 1..490: mol_type = genomic DNA
agagtttgatcctggctcaggacgaacgctggcggcgtgcttaacacatgcaagtcgaacgggaagctttgacaagttttactttgatgagtggacagtggcgaacgggtgagtaacgcgtaggtaaccaaccttatgctgggggatagcctttggaaacgaagagtaataccgcataagaccacactgccgcatggcagaggggtaaaagatttattggcatgagacggacctgcgtaccattagatagttggtggggtaacggcctaccaagtcgacgatggttagccgacctgagagggtgatcggccacattgggactgagacacggcccagactcctacgggaggcagcagtggggaatattgtacaatggaggaaactctgatacagcaacgccgcgtgagtgatgaaggttttaggattgtaaagctctgtctttggggacgaagaaagtgacggtacccaaggaggaagccccggctaacta

SEQ ID NO: 7607 - DNA, 490 bp, unidentified
  misc_feature 1..490: note = Ascusbbf_744755, encodes 16S rRNA
  source 1..490: mol_type = genomic DNA
agagtttgatcctggctcaggataaacgctggcggcgcacataagacatgcaagtcgaacgaacttaattcattcttatagattgaaagcggttagtggcggactggtgagtaatgtgtaagcaatctgcctattagaggggaacaacagtcggaaacgactgctaataccgcatatgccataactatcgcatgatagaagtgggaaaggagcaatccgctgatagatgagcttacatctgattagctagttggtggggtaacggcctaccaaggcgacgatcagtagccgaactgagaggttaaacggccacattgggactgagatacggcccagactcctacgggaggcagcagtcgggaatattgcgcaatggaggaaactctgacgcagtgacgccgcgtgcaggaagaaggttttcggattgtaaactgctttagacagggaagaacaaggacagtacctgtagaataagctccggctaactacg

SEQ ID NO: 7608 - DNA, 468 bp, unidentified
  misc_feature 1..468: note = Ascusbbf_208241, encodes 16S rRNA
  source 1..468: mol_type = genomic DNA
agagtttgatcctggctcagaacgaacgctggcggcaggcttaacacatgcaagtcgagcgccccgcaaggggagcggcagacgggtgagtaacgcgtgggaatctacccagtccttcggaatagctcctggaaacgggaattaataccggatacgccctttgggggaaagatttatcgggattggatgagcccgcgttggattagctagttggtggggtaatggcctaccaaggcgacgatccatagctggtctgagaggatgatcagccacactgggactgagacacggcccagactcctacgggaggcagcagtggggaatattggacaatgggcgcaagcctgatccagccatgccgcgtgagtgatgaaggccttagggttgtaaagctctttcaccggtgaagataatgacggtaaccggagaagaagccccggctaacttcgtgccagcagccgcggtaat

SEQ ID NO: 7609 - DNA, 490 bp, unidentified
  misc_feature 1..490: note = Ascusbbf_1804299, encodes 16S rRNA
  source 1..490: mol_type = genomic DNA
agagtttgatcctggctcaggacgaacgctggcggcgtgctttaaacatgcaagtcgaacggaggttaggtgttccactaagcatttctatatgaggtgtttagtggaatgcttacccttagtggcggacgggtgagtaacgcgtgagtaatctacctctttctgggggacaacagttggaaacgactgctaataccgcatatgaccacagagacacaagtcttaggggtgaaagatttatcgaaaagagatgagctcgggtagcattagttagttggtgaggtaacggcccaccaagacgatgatgcttagccgatctgagaggatgatcggccacactggaactgagatacggtccagactcctacgggaggcagcagttaggaatattgggcaatggaggcaactctgacccagcaacgccgcgtgaaggatgaaggtcctcggattgtaaacttctgtattagaggaagaagatagtgacggtact

SEQ ID NO: 7610 - DNA, 490 bp, unidentified
  misc_feature 1..490: note = Ascusbbf_792346, encodes 16S rRNA
  source 1..490: mol_type = genomic DNA
agagtttgatcctggctcaggatgaacgctagcggcaggcctaacacatgcaagtcgaggggtatttggagcttgctccaaagagaccggcgcacgggtgcgtaacgcgtatgcaatctgccttgtactgagggatagcccggagaaatccggattaatacctcatggttaatttagttggcatcaattgaattataaagatttatcggtacaagatgagcatgcgtcccattagctagttggtatggtaacggcataccaaggctatgatgggtaggggtcctgagagggagatcccccacactggtactgagacacggaccagactcctacgggaggcagcagtgaggaatattggtcaatggacggaagtctgaaccagccatgccgcgtgcaggacgacgcatctatggtgtgtaaactgcttctatacgggaagaaacctctctacgtgtagagacttgacggtaccgtaagaataaggatcggc

SEQ ID NO: 7611 - DNA, 490 bp, unidentified
  misc_feature 1..490: note = Ascusbbf_339604, encodes 16S rRNA
  source 1..490: mol_type = genomic DNA
agagtttgatcctggctcaggatgaacgctagcgggaggcctaacacatgcaagccgagcggtattgtttcttcggaaatgagagagcggcgtacgggtgcggaacacgtgtgcaacctgcctttatctgggggatagcctttcgaaaggaagattaatactccataatatattgattggcatcaattaatattgaaagctccggcggatagagatgggcacgcgcaagattagctagttggtgaggtaacggctcaccaaggcgatgatctttagggggcctgagagggtgatcccccacactggtactgagacacggaccagactcctacgggaggcagcagtgaggaatattggtcaatgggtgcaagcctgaaccagccatcccgcgtgaaggacgactgccctatgggttgtaaacttcttttgtatagggataaacctaccctcgtgagggtagctgaaggtactatacgaataagcaccggct

SEQ ID NO: 7612 - DNA, 490 bp, unidentified
  misc_feature 1..490: note = Ascusbbf_469459, encodes 16S rRNA
  source 1..490: mol_type = genomic DNA
agagtttgatcatggctcaggatgaacgctggcggcgtgcttaacacatgcaagtcgagcgagaactcgctcagccaattcttcggatgaagcagagcgacggaaagcggcggacgggtgagtaacgcgtgggaaacctgccctttgcagggggacagccgagggaaacttcgattaataccccataacaccaaagtatcgcatggtacaatggccaaagatttatcggcaaaggatggtcccgcgtctgattagttagttggtgaggtagcggctcaccaaggcgacgatcagtagccggcctgagagggtgaacggccacgttggaactgagacacggtccagactcctacgggaggcagcagtggggaatattgcacaatgggcgaaagcctgatgcagcaacgccgcgtgaaggaagaaggccttcgggtcgtaaacttctgtcctaggggaagaaaaatgacggtacccttggaggaagccccgg

SEQ ID NO: 7613 - DNA, 490 bp, unidentified
  misc_feature 1..490: note = Ascusbbf_505392, encodes 16S rRNA
  source 1..490: mol_type = genomic DNA
agagtttgatcctggctcaggatgaacgctggcggcgtgcttaacacatgcaagtcgaacggagctgttccggacgcctagggcttcggccacgggcggaaggaacgacttagtggcggacgggtgagtaacgcgtgggcaacctgcctttttccgggggataacacagggaaacctgtgctaataccgcataaagtcatctgaggacatcctctaatgaccaaaggaatttttccggggaaagaggggcccgcgtctgattagcttgttggtgaggtaacggcccaccaaggcaacgatcagtagccgaactgagaggttgatcggccacattgggactgagacacggcccagactcctacgggaggcagcagtggggaatattgcgcaatgggggaaaccctgacgcagcaacgccgcgtgaaggatgaaggttttcggattgtaaacttctttgacaggggacgaacaatgacggtaccctgaaaac

SEQ ID NO: 7614 - DNA, 490 bp, unidentified
  misc_feature 1..490: note = Ascusbbf_122064, encodes 16S rRNA
  source 1..490: mol_type = genomic DNA
agagtttgatcatggctcaggatgaacgctggcggcgcgcctaacacatgcaagtcgaacggacgaggctcttcggagccaagttagtggcgaacgggtgagtaacacgtgaggaacctgcctttcagagggggataacacttagaaataggtgctaataccgcataagaccacagagcggcatcgctcaggggtcaaaggagcaatccgctgaaagatggcctcgcgtccgattaggtagtaggcggggcaacggcccacctagcctgcgatcggtagccggactgagaggttgatcggccacattgggactgagacacggcccagactcctacgggaggcagcagtggggaatattgggcaatgggggaaaccctgacccagcgacgccgcgtgagggaagaaggttttcggattgtaaacctctgtcttcggggacgataatgacggtacccgaggaggaagctacggctaattacgtgccagcagc

SEQ ID NO: 7615 - DNA, 490 bp, unidentified
  misc_feature 1..490: note = Ascusbbf_1347021, encodes 16S rRNA
  source 1..490: mol_type = genomic DNA
agagtttgatcctggctcaggatgaacgctggcggcgtgcttaacacatgcaagtcgaacggagttatctcgctgaggagagcttgctcaaatcttgagataacttagtggcggacgggtgagtaacgcgtggataacctgccttatactgggggataacacttagaaataggtgctactaccgcataagcgcacgttcccgcatgggaaagtgtgaaaaactccggtggtgtacgatggatccgcgtctgattagatagttggtgaggtaacggcccaccaagtcaacgatcagtagccggcctgagagagggaacggcaacattgggactgagcgacggcgcaaacgcctacgggaggcagcagtggggaagattgcacaatgggggaaagcctgaggcagcgacgccgcgtgagtgaagaagtatgtcggtatgtaaagctctatcagcaaggaagaaaaaaatgacggtacttgactaagaagccc

SEQ ID NO: 7616 - DNA, 490 bp, unidentified
  misc_feature 1..490: note = Ascusbbf_37018, encodes 16S rRNA
  source 1..490: mol_type = genomic DNA
agagtttgatcatggctcaggacgaacgctggcggcgcgcctaacacatgcaagtcgaacggagttaagagagcttgctttcttaacttagtggcggacgggtgagtaacacgtgagcaacctgcctttcagtgggggacaacagttggaaacgactgctaataccgcataacgttgcgaaggggcatccctttgcaaccaaagatttatcgctgaaagatgggctcgcgtctgattagatagttggtgaggtaacggcccaccaagtcgacgatcagtagccggactgagaggttgaacggccacattgggactgagacacggcccagactcctacgggaggcagcagtgggggatattggacaatgggggcaaccctgatccagcgacgccgcgtgagggaagaaggttttcggattgtaaacctctgttgacagggaagaaaatgacggtacctgttaagaaagccacggctaactacgtgccagca

SEQ ID NO: 7617 - DNA, 490 bp, unidentified
  misc_feature 1..490: note = Ascusbbf_171130, encodes 16S rRNA
  source 1..490: mol_type = genomic DNA
agagtttgatcatggctcaggacgaacgctggcggcgtgcttaacacatgcaagtcgaacgagtgtatgaaggagcttgctcttgattacacgagtggcggacgggtgagtaacgcgtgaataatctgtcctatacagggggataacgcatcgaaagatgtgctaataccgcgtaggaccacggtactgcatggtactgaggtgaaaggagcaatccagtatagggtgagttcgcgtctgattagatagttggtgcggtaacggcgcaccaagtcaacgatcagtagccgacctgagagggtgatcggccacattgggactgagacacggcccagactcctacgggaggcagcagtggggaatattgggcaatgggcgaaagcctgacccagcaacgccgcgtgaaggaagaaggttttcggattgtaaacttctgtcctatgtgaagagcgagagacggtagcataggaggaagccccggctaactacg

SEQ ID NO: 7618 - DNA, 490 bp, unidentified
  misc_feature 1..490: note = Ascusbbf_59196, encodes 16S rRNA
  source 1..490: mol_type = genomic DNA
agagtttgatcctggctcaggatgaacgctggcggcgtgcttaacacatgcaagtcgaacggagctttttatgaacaagacttcggtcaagtgaattctaagcttagtggcggacgggtgagtaacgcgtgagcaacctgcctttcagagggggataacgtttggaaacagacgctaataccgcatgacatagttttctcgcatgagaggactatcaaaggagcaatccgctgaaagatgggctcgcgtccgattaggtagttggtgaggtaacggcccaccaagccgacgatcggtagccggactgagaggttgaacggccacattgggactgagacacggcccagactcctacgggaggcagcagtggggaatattgcacaatgggcgaaagcctgatgcagcaacgccgcgtgagggaagacggttttcggattgtaaacctctgtctttggtgaagaagaagtgacattagccgaggaggaagcca

SEQ ID NO: 7619 - DNA, 354 bp, unidentified
  misc_feature 1..354: note = Ascusbbf_363946, encodes 16S rRNA
  source 1..354: mol_type = genomic DNA
agagtttgatcctggctcagattgaacgctggcggcaggcctaacacatgcaagtcgagcggtagcacagagagcttgctctcgggtgacgagcggcggacgggtgagtaatgtctgggaaactgcctgatggagggggataactactggaaacggtagctaataccgcataatgtcgcaagaccaaagtgggggaccttcgggcctcatgccatcagatgtgcccagatgggattagctagtaggtggggtaacggctcacctaggcgacgatccctagctggtctgagaggatgaccagccacactggaactgagacacggtccagactcctacgccagcagccgcggtaat

SEQ ID NO: 7620 - DNA, 490 bp, unidentified
  misc_feature 1..490: note = Ascusbbf_144240, encodes 16S rRNA
  source 1..490: mol_type = genomic DNA
agagtttgatcctggctcaggatgaacgctggcggcgtgcttaacacatgcaagtcgaacgaagcgtctcgcccgaagaagcgaagtgcttgcacggagtggattcaattgagacgacttagtggcggacgggtgagtaacgcgtgggtaacctgccgtatgcagggggacaacagttggaaacgactgctaataccgcataagcgcacggctcggcatcgagcagtgtgaaaagatttatcggcatacgatggacccgcgtctgattagctagttggtgaggtaacggcccaccaaggcgacgatcagtagccgacctgagagggtgaccggccacattgggactgagacacggcccaaactcctacgggaggcagcagtggggaatattgcacaatgggcgcaagcctgatgcagcgacgccgcgtgagcgatgaagtatttcggtatgtaaagctctatcagcagggaagataatgacggtacctga

SEQ ID NO: 7621 - DNA, 490 bp, unidentified
  misc_feature 1..490: note = Ascusbbf_114555, encodes 16S rRNA
  source 1..490: mol_type = genomic DNA
agagtttgatcatggctcaggatgaacgctagctacaggcttaacacatgcaagtcgaggggcagcatgtatctggcttgccagatatgatggcgaccggcgcacgggtgcgtaacgcgtatccaacctgccgtttacccggggacagcctcgcgaaagcgagattaatacccgatgttgtgcgtattccgcatggtgtgcgcaccaaaggtttttccggtaagcgatggggatgcgtacgattagctggtcggcggggtaacggcccaccgaggcatcgatcgttaggggttctgagaggatggccccccacactgggactgagacacggcccagactcctacgggaggcagcagtgaggaatattggtcaatgggcgtaagcctgaaccagccaagtagcgtgcaggacgactgccttacaggttgtaaactgcttttatgcgggggtaaagtgtcccacgtgtgggatattgcaagtaccgcatgaa

SEQ ID NO: 7622 - DNA, 490 bp, unidentified
  misc_feature 1..490: note = Ascusbbf_708811, encodes 16S rRNA
  source 1..490: mol_type = genomic DNA
agagtttgatcctggctcagaacgaacgctggcagcgtggattaggcatgcaagtcgaacgggatccggagggcagcaatgttctccggtgagagtggcggaagggcgaggagcacgtggacaacctgtccagaggacggggaaaacctcgggaaactgaggctaatacccgatgcgccgggaggagggcatccttcctccggcaaagggggcgagagctcccgcctcacgaagggtccgcgcaccatcagcttgttggcggggtgacggcccaccaaggctcacggttagctggtctgagaggatgaccagccgcactgggactgagatactgcccagactcctacgggaggctgcagtcgaggatcattcgcaatgggggaaaccctgacgatgcgacgctgcgtggaggatggaggccttcgggttgtaaactcctgtcatgggggaagaggcggagggacccaacacgtccccgagttgacggtac

SEQ ID NO: 7623 - DNA, 490 bp, unidentified
  misc_feature 1..490: note = Ascusbbf_3503, encodes 16S rRNA
  source 1..490: mol_type = genomic DNA
agagtttgatcatggctcaggatgaacgctggcggcgtgcttaacacatgcaagtcgaacgaggcacctttgcagaagttttcggatggaagcggaggcgaccgagtggcggacgggtgagtaacgcgtggggaacctgccccattccgggggataccagttggaaacgactgttaataccgcataagcgcacggaaggacatccttttgtgtgaaaaactgaggtggaatgggatggccccgcgtctgattagccagttggcagggtaacggcctaccaaagcgacgatcagtagccggcctgagagggcgaccggccacattgggactgagacacggcccaaactcctacgggaggcagcagtggggaatattgcacaatgggggaaaccctgatgcagcgacgccgcgtgagtgaagaagtatttcggtatgtaaagctctatcagcagggaagaagatgacggtacctgcacaagaagccccggct

SEQ ID NO: 7624 - DNA, 490 bp, unidentified
  misc_feature 1..490: note = Ascusbbf_7506, encodes 16S rRNA
  source 1..490: mol_type = genomic DNA
agagtttgatcatggctcaggatgaacgctggcggcaggcttaatacatgcaagtcgaacggtaaggtccgaagtggcaacacggaggatacacgagtggcgcacgggtgcgtaacgcgtatgcaacctgcccccgaccgggacaaaacagctggaaacggctgctaatatcccatggtcatgcggaagggcatccttcttcatgtaaagattcattggtcggggatgggcatgcgtattattaggtagttggcggggtaacggcccaccaagccgacgatgattaggggtcctgagagggttaacccccacactggaactgagacacggtccagactcctacgggaggcagcagtagggaatattgggcaatgggagcaatcctgacccagccatgccgcgtgaaggaagacggccctatgggttgtaaacttcttttgccgcagagtaaacccggtcacgagtggtcggttgagagtatgcggcgaat

SEQ ID NO: 7625 - DNA, 490 bp, unidentified
  misc_feature 1..490: note = Ascusbbf_72759, encodes 16S rRNA
  source 1..490: mol_type = genomic DNA
agagtttgatcatggctcaggatgaacgctagcggcaggcttaacacatgcaagtcgaggggcagcgcgggtagcaatacctggcggcgaccggcgaaagggtgagtaacgcgtgagcaacatgcccgatactgggggatagtcattagaaatgatgcgtaataccccgtaacacattttcccgcatgggtagatgttgaaagattgattggtatcggattggctcgcgtgccattagctagatggcggggtaacggcccaccatggcgacgatggctaggggttctgagaggaaggtcccccacattggaactgagacacggtccagactcctacgggaggcagcagtgaggaatattggacaatggccggaaggctgatccagccatgccgcgtgcgggaagacggccctatgggttgtaaaccgcttttgcgggggagcaataagagtcacgagtggctcgatgagagtaccctgcgaataagcatc

SEQ ID NO: 7626 - DNA, 490 bp, unidentified
  misc_feature 1..490: note = Ascusbbf_29608, encodes 16S rRNA
  source 1..490: mol_type = genomic DNA
agagtttgatcatggctcaggatgaacgctggcggcgtgcctaatacatgcaagtcgaacgctaaccttcgggttagagtggcgaacgggtgagtaacacgtaggtaacctgcccataagacgaggataactactggaaacggtagctaatactggataggatattgaatcgcatgatttaatatttaaagatgcgtttgcatcacttatggatggacctgcggcgcattagctagttggtgaggtaacggcccaccaaggcgacgatgcgtagccggactgagaggttgaacggccacattgggactgagacacggcccagactcctacgggaggcagcagtagggaattttcggcaatggacgcaagtctgaccgagcaacgccgcgtgagtgatgaagttcttcggaacgtaaaattcttttatttggaaaaaacgtatgttgtaggaaatgacaatatagtgatggtaccaaatgaataagccccg

SEQ ID NO: 7627 - DNA, 489 bp, unidentified
  misc_feature 1..489: note = Ascusbbf_102528, encodes 16S rRNA
  source 1..489: mol_type = genomic DNA
agagtttgatcatggctcagaacgaacgctggcggcaggcctaacacatgcaagttgaacgggattgacgggtagcttgctatttgtcatgagagtagcgcactggtgagtaacacgtgggaacataccttttagtgggggacaacagggggaaacttctgctaataccgcataaaccctgagggggaaaggagcaattcgctaaaagattggcccgcggaagattaggtagttggtgaggtaaaggcccaccaagcctacgatctatagctggtctgagaggacgaacagccacattggaactgagacacggtccagactcctacgggaggcagcagtgaggaatattgggcaatggaggaaactctgacccagccatgccgcgtgagtgagaaggtcttcggattgtaaagctcttttatacaggaagatgatgacagtactgtaagaaaaagcaccggcaaacttcgtgccagcagccgcggtaat

SEQ ID NO: 7628 - DNA, 490 bp, unidentified
  misc_feature 1..490: note = Ascusbbf_366184, encodes 16S rRNA
  source 1..490: mol_type = genomic DNA
agagtttgatcctggctcagggtgaacgctagcggcaggcttaacacatgcaagtcgaggggcagcgggtctagcaatagatgccggcgaccggcgaaagggtgagtaacgcgtgagcaacgtgcccgtctgtgggggatagtcattggaaacgatgcgcaataccccgtaacatatcggatcgcatggtctggtattgaaagattgattgcagacggatcggctcgcgtaccattaggtagacggcggggtaatggcccaccgtgccgacgatggttaggggttctgagaggaaggtcccccacattggaactgagacacggtccagactcctacgggaggcagcagtgaggaatattggacaatggccggaaggctgatccagccatgccgcgtgcgggaagacggccctatgggttgtaaaccgcttttgcgagggagcaataaggtctacgcgtagaccgatgagagtaccttacggataagcatc

SEQ ID NO: 7629 - DNA, 490 bp, unidentified
  misc_feature 1..490: note = Ascusbbf_205657, encodes 16S rRNA
  source 1..490: mol_type = genomic DNA
agagtttgatcctggctcaggatgaacgctagcgacaggcttaacacatgcaagtcgaggggcagcggagatgtagcaatacatttgccggcgaccggcgcacgggtgagtaacgcgtatgcaacctacctatcagaggagaataacccggcgaaagtcggactaatactccataaaacaggggtctcgcatgagactatttgttaaagatttatcgctgatagatgggcatgcgttccattagctagttggtgaggtaacggctcaccaaggcaacgatggatcggggttctgagaggaaggtcccccacactggtactgagacacggaccagactcctacgggaggcagcagtgaggaatattggtcaatgggcgcgagcctgaaccagccaagtcgcgtgaaggatgaaggatctatggttcgtaaacttcttttatacgggaataaagtgcagcacgtgtgctgttttgtatgtaccgtaatgaat

SEQ ID NO: 7630 - DNA, 490 bp, unidentified
  misc_feature 1..490: note = Ascusbbf_238854, encodes 16S rRNA
  source 1..490: mol_type = genomic DNA
agagtttgatcatggctcaggatgaacgctggcggtgtgcctaatacatgcaagtcgagcgggagaacttgttctctagcggcgaacgggtgagtaacacgttggtaatctacctttcagttggggatacccaggcgaaagcttggctaataccgtaatacgtattaatctgaaatgtttaatataaaaggcccttcggggtcgctgatagatgagcctgcgtctgattagctagttggtgagataatagcccaccaaggcgaggatcagtagccgacctgagagggtgatcggccacaatggaactgagacacggtccatactcctacgggaggcagcagtagggagtcttcgacaatgggggaaaccctgatcgagcaacaccgcgtgaatgatgaaggtcttcggattgtaaaattcttttgttagggagaaatggtcagtataggtaatgatactgatttgatagtacctttcgaataagcaacga

SEQ ID NO: 7631 - DNA, 486 bp, unidentified
  misc_feature 1..486: note = Ascusbbf_1434952, encodes 16S rRNA
  source 1..486: mol_type = genomic DNA
agagttgatcctggctcagaacgaacgctggcggcaggcttaacacatgcaagttgagcgggattgattagtagcttgctattgatcatgagagcagcgcactggtgagtaacacgttggaacataccttttgtttggggacaacagttggaaacgactgctaataccgcataagccctaagggggaaagattcattgccgaaagattggcccgcggaagattaggtagtaggtggggtaacggcctacctagccgacgatctatagcttgtctgagaggacgatcagccacattggaacggagacacggtccagactcctacgggaggcagcagggaggaatattgggcaatggaggcaactcggacacagccatgccgcgtgagtgaagaaggttttcggatggtaaagctctgtcagacgggaagaggatgacggtaccgtcagaagaagcaccggctaacttcgtgccagcagccgcggtaa

SEQ ID NO: 7632 - DNA, 490 bp, unidentified
  misc_feature 1..490: note = Ascusbbf_178184, encodes 16S rRNA
  source 1..490: mol_type = genomic DNA
agagtttgatcatggctcagaatcaacgctggcggcgtgcctcagacatgcaagtcgaacgattaagacttccttcgggaagtgtataaagtggcgcacgggtgagtaacacgtaagtaatctaccttcgagtggggaataacatcgggaaatcggtgctaataccgcataatgcagcggcacctaatggtgacagttgttaaaggaatttatttcgcttgaagaggagcttgcggcagattagctagttggtaaggtaaaggcttaccaaggctacgatctgtatccggcctgagagggcggtcggacacactgacactgaataacgggtcagactcctacgggaggcagcagtcgggaattttgggcaatgggggaaaccctgacccagcaacgccgcgtgaaggatgaagtatttcggtatgtaaacttcgaaagaataggaagaataaatgacggtactatttataagctccggctaactacgtgc

SEQ ID NO: 7633 - DNA, 490 bp, unidentified
  misc_feature 1..490: note = Ascusbbf_1487805, encodes 16S rRNA
  source 1..490: mol_type = genomic DNA
agagtttgatcatggctcagattgaacgctggcggcaggcttaacacatgcaagtcgagcgggggaaggtagcttgctaccggacctagcggcggacgggtgagtaatacttaggaatctgcctattagtgggggacaacgtttcgaaagggacgctaataccgcatacgtcctacgggagaaagcaggggctctttatgaccttgcgctaatagatgagcctaagtcggattagctagttggtggggtaaaggcctaccaaggcgacgatctgtagcgggtctgagaggatgatccgccacactgggactgagacacggcccagactcctacgggaggcagcagtggggaatattggacaatggggggaaccctgatccagccatgccgcgtgtgtgaagaaggcatttttgttgtaaagcactttaagcgaggaggaggctctttaggttaataccctgaatgagtggacgttactcgcagaataagc

SEQ ID NO: 7634 - DNA, 490 bp, unidentified
  misc_feature 1..490: note = Ascusbbf_770294, encodes 16S rRNA
  source 1..490: mol_type = genomic DNA
agagtttgatcctggctcaggatgaacgctggcggcgtgcctaacacatgcaagtcgaacggggatctagaggaaaaggtacttgtacctcggaatttagattctagtggcggacgggtgagtaacacgtgagcaacctgccttgatcagggggataacaacgggaaaccgttgctaataccgcataatatgccgctggggcatcccagtggcatcaaaggagtaatccggattgagatgggctcgcgtccgattagttagttggtgaggtaacggctcaccaagactgcgatcggtagccggactgagaggttgaccggccacattgggactgagacacggcccagactcctacgggaggcagcagtggggaatattgggcaatgggggaaaccctgacccagcgacgccgcgtgaaggatgaaggccttcgggttgtaaacttctttgatcggggacgataatgacggtacccgaggaacaagccacg

SEQ ID NO: 7635 - DNA, 490 bp, unidentified
  misc_feature 1..490: note = Ascusbbf_347, encodes 16S rRNA
  source 1..490: mol_type = genomic DNA
agagtttgatcatggctcaggatgaacgctggcggcaggcttaatacatgcaagtcgaacggtaaggcctgaagtggcaacacggagggtacacgagtggcgcacgggtgcgtaacgcgtatgcaacctgcccccaaccgggacaaaacagctggaaacggctgctaatatcccatagtcatgaggaggggcatccctctttatgtaaagattcattggttggggatgggcatgcgtattattaggtagttggcggggtaacggcccaccaagccgacgatgattaggggtcctgagagggttatcccccacactggaactgagacacggtccagactcctacgggaggcagcagtagggaatattgggcaatgggagcaatcctgacccagccatgccgcgtgaaggaagacggtcctatggattgtaaacttcttttgccgcagagtaaacggtgccacgtgtggtgctttgagagtatgcggcgaat

SEQ ID NO: 7636 - DNA, 490 bp, unidentified
  misc_feature 1..490: note = Ascusbbf_28526, encodes 16S rRNA
  source 1..490: mol_type = genomic DNA
agagtttgatcatggctcaggatgaacgctggcggcgtgcctaacacatgcaagtcgaacggagatcatatggacagaggcttcggccgaaggaagtttgatcttagtggcggacgggtgagtaacgcgtggggaacctgccccataccgggggataacagatagaaatgtctgctaataccgcataagcgcacgaggtcgcatgaccctgtgtgaaaaactccggtggtatgggatggacccgcgttggattagccagttggcggggtaacggcccaccaaagcgacgatccatagccggcctgagagggtgaacggccacattgggactgagacacggcccagactcctacgggaggcagcagtggggaatattgcacaatggggggaaccctgatgcagcgacgccgcgtgaaggaagaagtatctcggtatgtaaacttctatcagcagggaagaaaatgacggtacctgactaagaagccccggc

SEQ ID NO: 7637 - DNA, 490 bp, unidentified
  misc_feature 1..490: note = Ascusbbf_48878, encodes 16S rRNA
  source 1..490: mol_type = genomic DNA
agagtttgatcatggctcaggatgaacgctagcgggaggcttaacacatgcaagtcgaggggcagcgcgggtagcaatacctggcggcgaccggcggacgggtgagtaacacgtatgcaacctgccctgcacaggggaatagcccggagaaatccggattaatgccccatggtccactgggtccgcatggatctggtggtaaagattcatcggtgcaggatgggcatgcgttccattagctagttggcggggcaacggcccaccaaggcgacgatggatatggggtctaaaaggatggtcccacacattggcactgagatacgggccaaactcctacgggaggcagcagtgaggaatattggtcaatgggcgagagcctgaaccagccatcccgcgtgcaggatgaaggtcttacagattgtaaactgcttttgcaggggacgaataagggccacgtgtggtccgatgacagtactctgtgaataagcat

SEQ ID NO: 7638 - DNA, 490 bp, unidentified
  misc_feature 1..490: note = Ascusbbf_1808780, encodes 16S rRNA
  source 1..490: mol_type = genomic DNA
agagtttgatcatggctcaggatgaacgctggcggcgtgcctaatacatgcaagtcgaacgagggtgcttgcaccctagtggcgaacgggtgagtaacacgtaggtaatctgcccttaagcttgggatacccagaggaaactttggctaataccggataacaacagaggaggcatctcctcagcttgaaaggccctgcaaggggtcacttaaggatgaacctgcggcgcattagctagttggtgagataacagcccaccaaggcgaggatgcgtagccgacctgagagggtgatcggccacattggaactgagacacggtccaaactcctacgggaggcagcagtaaggagtgttcggcaatgggggaaaccctgaccgagcaacgccgcgtgagcgatgacggccctatgggttgtaaagctctgttgtaagggacgaatgactagcttaggaaatgcagctagtttgacggtaccttaccagaaagcc

SEQ ID NO: 7639 - DNA, 490 bp, unidentified
  misc_feature 1..490: note = Ascusbbf_37626, encodes 16S rRNA
  source 1..490: mol_type = genomic DNA
agagtttgatcctggctcagagcgaacgctagcggcatgcttaacacatgcaagtcgaacgagggaagttgattgagtagcaatacgatttcaatggaacgagtggcaaacgggtgagtaatatattggaacttgcccagtagtgggggacaacagttggaaacgactgctaataccgcataacgcagagatgcgaaagccgaaaggcgctattggagaggccaatacacgattagctagttggtggggtaaaggcctaccaaggcggtgatcgttagccggtcttagaggacgatcggccacattgggactgagacacggcccagactcctacgggaggcagcagtggggaatattggacaatgggcgaaagcctgatccagcaatgccgcgtgagtgatgaaggcgttatgcgttgtaaaactcttttgcatatgaaaataatgatggtaatatgagaataagcaccgactaactatgtgccagcagc

SEQ ID NO: 7640 - DNA, 490 bp, unidentified
  misc_feature 1..490: note = Ascusbbf_112868, encodes 16S rRNA
  source 1..490: mol_type = genomic DNA
agagtttgatcctggctcaggatgaacgctggcggcgcatttaagacatgcaagtcgaacgaagaatttgcaccgaatgaaagatgaagattcatcagattctggatttcaccgtaaattcttagtggcggacgggtgagtaatacgtagataatctgccttctagagggaaataacagagagaaatttctgctaatgtcccataagaccacactatggcatcttagagtgatcaaaggagtaatccgctagaagatgagtctacggctgattagccagttggcagtgtaagagactaccaaagctatgatcagtagccgagctgagaggctggccggccacattgggactgagacacggcccagactcctacgggaggcagcagttgggaatattggacaatggaggaaactctgatccagtgacgccgcgtgaaggaagaaggtcttcggattgtaaacttattttgtcagggaagaattttgactgt

SEQ ID NO: 7641 - DNA, 490 bp, unidentified
  misc_feature 1..490: note = Ascusbbf_23991, encodes 16S rRNA
  source 1..490: mol_type = genomic DNA
agagtttgatcatggctcaggatgaacgctggcggcgtgcctaacacatgcaagtcgaacgaagcattaggctttgagattttcggattgagaagccttctgacttagtggcggacgggtgagtaacgcgtgggtaacctgccgtatgcagggggacaacagttggaaacgactgctaataccgcataagcgcacgagatcgcatggttttgtgtgaaaagatttatcggcatacgatggacccgcgtctgattaggtagttggtgaggtaacggcccaccaagcctgcgatcagtagccgacctgagagggtgaccggccacattgggactgagacacggcccaaactcctacgggaggcagcagtggggaatattgcacaatgggggaaaccctgatgcagcgacgccgcgtgagtgaagaagtatttcggtatgtaaagctctatcagcagggaagaaaatgacggtacctgcacaagaagccccgg

SEQ ID NO: 7642 - DNA, 490 bp, unidentified
  misc_feature 1..490: note = Ascusbbf_1890154, encodes 16S rRNA
  source 1..490: mol_type = genomic DNA
agagtttgatcatggctcagaacgaacgctggcggcgtgcttaacacatgcaagtcgaacggcagcgcggacttcggtctggcggcgagtggcgaacgggtgagtaatatatcggaacgtgcccagtagcgggggataactacgcgaaagcgtggctaataccgcatacgccctacgggggaaagggggggattcttcggaacctctcactattggagcggccgatatcagattagctagttggtggggtaaaggctcaccaaggcgacgatctgtagctggtttgagaggacgaccagccacactgggactgagaaacggcccagactcctacgggaggcagcagtggggaattttggacaatgggggaagccctgatccagccatcccgcgtgtgcgatgaaggccttcgggttgtaaagcacttttggcagggaagaaacggcgccgcctaatacggggcgtcactgacggtacctgcagaataagc

SEQ ID NO: 7643 - DNA, 490 bp, unidentified
  misc_feature 1..490: note = Ascusbbf_20953, encodes 16S rRNA
  source 1..490: mol_type = genomic DNA
agagtttgatcatggctcagaacgaacgctggcggcgcgtcttaagcatgcaagtcgagcggtaagttatagcttgctataacctagagcggcggactggtgagtaacgcgtgggtgacgtaccctttggacggggatagcctgtggaaacacagggtaataccggatacggtgtcatgtgtcagaggcatgacaggaaaggttcttttgaaccgccgaaggagcggcccgcgtgctattagttagttggcggggtaacggcccaccaagacgacgatagctacccggcctaagagggtgaacgggcacattgggactgagatacggcccagactcctacgggaggcagcagctaagaatattccgcaatgggggaaaccctgacggagcgacgccgcgtggatgatgaaggccggaaggttgtaaaatccttttgggagcgaggaataatgaaagtgagagaaacgctttcaggtgacggtagcttctg

SEQ ID NO: 7644 - DNA, 490 bp, unidentified
  misc_feature 1..490: note = Ascusbbf_252151, encodes 16S rRNA
  source 1..490: mol_type = genomic DNA
agagtttgatcatggctcagaatgaacgctggcggcatggattaggcatgcaagtcgaacggggcccttcggggccgagtggcgaaagggtgagtaacacgtgagcaatctgcccccaaggctggaataagcactggaaacggtgtctaaaaccggatgaggtccgggtccgcatggtcccgcaaccaaatattcataccctggggatgagctcgcggcccattagctagttggcggggtaacggcccaccaaggctgcgacgggtaggtggtctgagaggatggtcacccacactgggactgagacactgcccagactcctacgggaggctgcagtcgagaatcttccgcaatgggcgcaagcctgacggagcgatgccgcgtgagggacgaaggccttcgggtcgtaaacctctgtcaccggggacgaattcatgacggtacccggaaaggaagccacggctaaccacgtgccagcagccgcggtaat

SEQ ID NO: 7645 - DNA, 468 bp, unidentified
  misc_feature 1..468: note = Ascusbbf_210235, encodes 16S rRNA
  source 1..468: mol_type = genomic DNA
agagtttgatcctggctcagaacgaacgctggcggcatgcctaacacatgcaagtcgaacgatggcttcggccatagtggcgcacgggtgagtaacacgtgggaacctgcctttcggttcggaataacgtctggaaacggacgctaacaccggatacgtccttcgggagaaagtttacgccgagagaggggcccgcgtcggattaggtagttggtggggtaatggcctaccaagcctgcgatccgtagctggtctgagaggatgatcagccacactgggactgagacacggcccagactcctacgggaggcagcagtggggaatattggacaatgggcgcaagcctgatccagcaatgccgcgtgagtgatgaaggccttagggttgtaaagctctttcgcacgcgacgatgatgacggtagcgtgagaagaagccccggctaacttcgtgccagcagccgcggtaat

SEQ ID NO: 7646 - DNA, 490 bp, unidentified
  misc_feature 1..490: note = Ascusbbf_86798, encodes 16S rRNA
  source 1..490: mol_type = genomic DNA
agagtttgatcatggctcaggactaacgctggcggcgtgcttaaaacatgcaagtcgaacgggcgattgaggaaagcttgcttttctcgaaagctagtggcggacgggtgagtaacgcgtgaacaatctgcctttcactggggaataacagatagaaatatctgctaataccgcatatgaccacaacgaggcatctcgaaggggtgaaagattttatcggtgaaagatgagttcgcgtaacattagctagttggtgaggtaacggcccaccaaggcaacgatgtttagccggcctgagagggtgaacggccacactggaactgagacacggtccagactcctacgggaggcagcagttaggaatattgggcaatgggggaaaccctgacccagcaacgccgcgtgaaggatgaaggtcctcggattgtaaacttctgttataaaggaataagaaagtgaaggtactttatgagaaagcaccggctaacta

SEQ ID NO: 7647 - DNA, 490 bp, unidentified
  misc_feature 1..490: note = Ascusbbf_234383, encodes 16S rRNA
  source 1..490: mol_type = genomic DNA
agagtttgatcatggctcaggatgaacgctggcggcgtgcttaacacatgcaagtcgaacggaacagatcaaccgaaacggaaggtgcttgcaccggaagtttcacctggtatgtttagtggcggacgggtgagtaacgcgtgagcaaccaaccttttgcagtgggataacaattagaaatgattgctaataccgcataagaccacactaccgcatgatagagtgggaaaaactccggtggcaaaagacgggctcgcgtccgattagctggatggtgaggtaacggcccaccatggcgacgatcggtagccggactgagaggtcgaccggccacattgggactgagacacggcccagactcctacgggaggcagcagtggggaatattgcacaatgggggaaaccctgatgcagcgacgccgcgtgagtgaagacgtatttcggtatgtaaagctcttttagcagggaagatgatgacggtacctgcaga

SEQ ID NO: 7648 - DNA, 490 bp, unidentified
  misc_feature 1..490: note = Ascusbbf_192944, encodes 16S rRNA
  source 1..490: mol_type = genomic DNA
agagtttgatcatggctcagattgaacgctagcgggatgccttacacatgcaagtcgaacggcagcgggaaagtagcttgctacttttgccggcgagtggcgaacgggtgagtaatgtatcggaacgtgcccagtagcgggggataactacgcgaaagcgtggctaataccgcatacgccctacgggggaaagggggggatcttaggacctctcactattggagcggccgatatcggattagctagttggtggggtaaaggcctaccaaggcgacgatccgtagctggtttgagaggacgaccagccacactgggactgagacacggcccagactcctacgggaggcagcagtggggaattttggacaatgggggaaaccctgatccagccatcccgcgtgtgcgatgaaggccttcgggttgtaaagcacttttgtcagggaagaaaaggtttcggataatacccggaactgatgacggtacctgaaga

SEQ ID NO: 7649 - DNA, 490 bp, unidentified
  misc_feature 1..490: note = Ascusbbf_790143, encodes 16S rRNA
  source 1..490: mol_type = genomic DNA
agagtttgatcctggctcaggatgaacgctagcggcaggcttaacacatgcaagtcgaggggcagcataataagtagcaatacctattgatggcgaccggcggatgggtgcgtaacgcgtatgcaacctaccttatacagggggataacctttcgaaagggagactaacaccccatagtattaatttaaggcatcttagattaattaaatatttataggtataagatgggcatgcgtatgattagctagttggtaaggtaacggcttaccaaggctacgatcattaggggttctgagaggaaggtcccccacactggtactgagacacggaccagactcctacgggaggcagcagtgaggaatattggtcaatgggcgcaagcctgaaccagccatgccgcgtgcaggatgacagccttatgggttgtaaactgcttttacataagactaaccgtatatttgcgaatatacctgaatgtattatgagaat

SEQ ID NO: 7650 - DNA, 490 bp, unidentified
  misc_feature 1..490: note = Ascusbbf_1740614, encodes 16S rRNA
  source 1..490: mol_type = genomic DNA
agagtttgatcctggctcaggatgaacgctagcggcaggcctaacacatgcaagtcgaggggcagcgggaaggggctcgcccttttgccggcgaccggcgcacgggtgcgcagcgcgtatggaacctgccctttacaggggaacagcccagggaaacttggattaatgccccatggcgccgtttcgcggaatcgcgttacggtcaaagcctccgggcggtaaaggatggccatgcgtcccattagctagttggtgcggtaacggcgcaccaaggccgcgatgggtaggggccctgagagggggatcccccacactggtactgagacacggaccagactcctacgggaggcagcagtgaggaatattggacaatgggcgggagcctgatccagccatgccgcgtgcaggaagaccgccctatgggtcgtaaactgcctttgtacgggaagaacaaggggcacttgtgcccccctgacggtaccgtaagaat

SEQ ID NO: 7651 - DNA, 490 bp, unidentified
  misc_feature 1..490: note = Ascusbbf_131934, encodes 16S rRNA
  source 1..490: mol_type = genomic DNA
agagtttgatcatggctcaggacgaacgctggcggcatgcctaacacatgcaagtcgaacggtaaggccccttcgggggtacacgagtggcgaacgggtgagtaacacgtgggtaacctgcccttcactgggggacaaccgagggaaacttcggctaataccgcatgatgtgcaacgtctcaagacgatgtaccaaaactccggtggtgaaggatgggcccgcggcggattagctagttggtggggtaatggcctaccaaggcgacgatccgtagctggtctgagaggacgatcagccacactggaactgagacacggtccagactcctacgggaggcagcagtggggaatcttgcgcaatgggcgaaagcctgacgcagcaatgccgcgtgagggaagacggtcttaggattgtaaacctctttcagcagggacgaaaacagacggtacctgcagaagaagccccggctaactacgtgccagcagccgc

SEQ ID NO: 7652 - DNA, 490 bp, unidentified
  misc_feature 1..490: note = Ascusbbf_49744, encodes 16S rRNA
  source 1..490: mol_type = genomic DNA
agagtttgatcatggctcaggacgaacgctggcggcgtgcctaacacatgcaagtcgaacgaagctcctgcgttgattcttcggatgaaacaagggaagacttagtggcggacgggtgagtaacgcgtgagcaacctgcctttcagagggggataacagttggaaacgactgctaataccgcataacgtattgatgtcgcatggcattgataccaaagctgaggcgctgagagatgggctcgcgtccgattagatagttggtggggtaacggcctaccaagtcgacgatcggtagccggactgagaggttgaacggccacattgggactgagacacggcccagactcctacgggaggcagcagtgggggatattgcacaatgggcgaaagcctgatgcagcaacgccgcgtgagggaagacggttttcggattgtaaacctctgtctttggtgaagaaggaagtgacggtagccaaggaggaagccacgg

SEQ ID NO: 7653 - DNA, 490 bp, unidentified
  misc_feature 1..490: note = Ascusbbf_28118, encodes 16S rRNA
  source 1..490: mol_type = genomic DNA
agagtttgatcatggctcaggatgaacgctggcggcgtgcttaacacatgcaagtcgaacggagctttttatgaacaagacttcggtcaagtgaattctaagcttagtggcggacgggtgagtaacgcgtgagcaacctgcctttcagagggggataacgtttggaaacagacgctaataccgcataacacggcgatatcgcatggtaatgccgtcaaaggagcaatccgctgagagatgggctcgcgtccgattaggtagttggtgaggtaacggcccaccaagccgacgatcggtagccggactgagaggttgaacggccacattgggactgagacacggcccagactcctacgggaggcagcagtggggaatattgcacaatgggcgaaagcctgatgcagcaacgccgcgtgagggaagacggttttcggattgtaaacctctgtctttggtgaagaagaagtgacattagccgaggaggaagcca

SEQ ID NO: 7654 - DNA, 490 bp, unidentified
  misc_feature 1..490: note = Ascusbbf_209070, encodes 16S rRNA
  source 1..490: mol_type = genomic DNA
agagtttgatcatggctcagaacgaacgctggcggcgcgtcttaagcatgcaagtcgagcgggaatacctagcttgctaggtatgagagcggcggactggtgagtaacacgtagataacgcaccctttagacggggatagctgccagaaatggcagataataccggatgtgaacgtatgccgtgaaggtgtacgtggaaaggagcttcggctccgctagaggaacggtctgcggcccatcagctggttggcggggtaaaggcccaccaaggcgatgacgggtatccggcctgagagggtgagcggacacattgggactgagatacggcccagactcctacgggaggcagcagctaagaatattccgcaatgggggaaaccctgacggagcgacgccgcgtggatgatgaaggccggaaggttgtaaaatccttttgaaaccgaggaataagttctgcaggaaatggcaggatggtgactgtaagttttga

SEQ ID NO: 7655 - DNA, 490 bp, unidentified
  misc_feature 1..490: note = Ascusbbf_35927, encodes 16S rRNA
  source 1..490: mol_type = genomic DNA
agagtttgatcatggctcaggataaacgctggcggcgtgcttaacacatgcaagtcgaacggagtagttctcccgaggattgatgaagcttgcttctgataaactcatttgagctacttagtggcggacgggtgagtaacgcgtgggtaacctgccctatgcagggggataacagttggaaacgactgttaataccgcataagcgcacagtatcgcatggtacagtgtgaaaaactccggtggcataggatggacccgcgtctgattagctagttggtgaggtaacggcccaccaaggcgacgatcagtagccggcctgagagggtgtacggccacattgggactgagacacggcccaaactcctacgggaggcagcagtggggaatattggacaatgggggaaaccctgatccagcgacgccgcgtgaacgatgaagtatttcggtatgtaaagttctatcagcagggaagataatgacggtacctgac

SEQ ID NO: 7656 - DNA, 490 bp, unidentified
  misc_feature 1..490: note = Ascusbbf_711850, encodes 16S rRNA
  source 1..490: mol_type = genomic DNA
agagtttgatcctggctcaggatgaacgctggcggcatgcctaagacatgcaagtcgaacgaagtagcctgttgaagactgagtgcttgcacgaagttggattcagattcctacttagtggcagacgggtgagtaacacgtgggtaacctacctcagagactgggataacaattagaaatgattgctaataccggatgattcatagatagaaaactatttatgctaaaagaagcgtttgcttcactttgagatgggcttgcgttgtattagttagttggtggggtaatggcctaccaagacaacgatgcatatccgagctgagaggctgatcggacacactgggactgagacacggcccagactcctacgggagacagcagttaggaatattcgtcaatgggggaaaccctgaacgagcaatgccgcgtgagtgatgaaggtcttatagattgtaaaactctgttgtaaagaaagaaaccttaagatagg

SEQ ID NO: 7657 - DNA, 472 bp, unidentified
  misc_feature 1..472: note = Ascusbbf_308285, encodes 16S rRNA
  source 1..472: mol_type = genomic DNA
agagtttgatcctggctcagagcgaacgctggcggcaggcttaacacatgcaagtcgagcgcgtgtagcaatacacgagcggcagacgggtgagtaacacgtgggaacgtgccttctggttcggaataactcagggaaacttgagctaataccgaataagcccttcgggggaaagatttatcgccggaagatcggcccgcgtaagattagctagttggtgaggtaatggctcaccaaggctacgatctttagctggtctgagaggatgatcagccacactgggactgagacacggcccagactcctacgggaggcagcagtggggaatattggacaatgggcgcaagcctgatccagccatgccgcgtgagtgatgaaggccttagggttgtaaagctcttttagcagggacgataatgacggtacctgcagaaaaagccccggccaacttcgtgccagcagccgcggtaat

SEQ ID NO: 7658 - DNA, 490 bp, unidentified
  misc_feature 1..490: note = Ascusbbf_1324295, encodes 16S rRNA
  source 1..490: mol_type = genomic DNA
agagtttgatcctggctcaggatgaacgctagcgacaggcttaacacatgcaagttgaggggcagcgcgacgagagcaatcttgctggcggcgaccggcgcactggtgagtaacacgtatgcaacctgccccctgccggggaataacccagggaaacctggcctaatgccgcataacacccgcggggacatccccgctggttgaaagctccggcggcaggggatgggcatgcgccgcattagcttgttggtggggtgacggcccaccacggcgacgatgcgtaggggttctgagaggaaggtcccccgtactggtactgagaaccggaccagactcctacgggaggcagcagtgaggaatattggtcaatggacgcgagtctgaaccagccaagtcgcgtgagggaagacggccctacgggttgtaaacctcttttgccggggagcaaccgcccgcacgcgtgcgggtctgagcgtacccggagaaaaag

SEQ ID NO: 7659 - DNA, 490 bp, unidentified
  misc_feature 1..490: note = Ascusbbf_2174, encodes 16S rRNA
  source 1..490: mol_type = genomic DNA
agagtttgatcatggctcaggatgaacgctagcggcaggcttaacacatgcaagtcgaggggcagcgcgggtagcaatacctggcggcgaccggcgaaagggtgcgtaacgcgtgagcaacttgcccgtatccgggggataagcgctggaaacggcgtctaataccgcataacaacagaagccgcatgacttctgtttgaaaactccggtggatacggatgggctcgcgagacattagcttgttggcggggtaacggcccaccaaggctacgatgtctaggggttctgagaggaaggtcccccacattggaactgagacacggtccaaactcctacgggaggcagcagtgaggaatattggtcaatggccggaaggctgaaccagccatgccgcgtgaaggattaaggccctatgggtcgtaaacttcttttgtggtggagcaataagtgtcacgtgtggcacgatgagagtacatcacgaataagcatc

SEQ ID NO: 7660 - DNA, 490 bp, unidentified
  misc_feature 1..490: note = Ascusbbf_9791, encodes 16S rRNA
  source 1..490: mol_type = genomic DNA
agagtttgatcatggctcaggatgaacgctggcggcgtgcctaacacatgcaagtcgaacggacgaggcggagcttgctctgccgagttagtggcggacgggtgagtaacgcgtgagcaacctgcctttcagagggggacaacgttgggaaaccggcgctaataccgcataatgtgcttttgtcgcatggcgaaagtaccaaaggagcaatccgctgaaagatgggctcgcgtctgattagatagttggtgaggtaacggcccaccaagtcgacgatcagtagccggactgagaggttgaacggccacattggaactgagatacggtccagactcctacgggaggcagcagtggggaatattgggcaatgggcgaaagcctgacccagcaacgccgtgtgaaggaagaaggtcttcggattgtaaacttttgtcatgtgggacgataatgacggtaccacaagaggaagtcacgactaactacgtgccag

SEQ ID NO: 7661 - DNA, 490 bp, unidentified
  misc_feature 1..490: note = Ascusbbf_20864, encodes 16S rRNA
  source 1..490: mol_type = genomic DNA
agagtttgatcatggctcaggataaacgctggcggcgtgcttaacacatgcaagtcgaacggggttatttcgagtagcttgctacatgaaataacctagtggcggacgggtgagtaacgcgtgggaaacctgcctcgtactgggggataacagttggaaacgactgttaataccgcataagcgcacgatgtcgcatgacatagtgtgaaaaactccggtggtacgagatggtcccgcgtctgattagctagttggtgaggtaacggcccaccaaggcgacgatcagtagccggcctgagagggtgtacggccacattgggactgagacacggcccaaactcctacgggaggcagcagtggggaatattgcacaatgggcgaaagcctgatgcagcgacgccgcgtgagtgatgaagtatctcggtatgtaaagctctatcagcagggaagataatgacggtacctgactaagaagcaccggctaaatacg

SEQ ID NO: 7662 - DNA, 490 bp, unidentified
  misc_feature 1..490: note = Ascusbbf_489399, encodes 16S rRNA
  source 1..490: mol_type = genomic DNA
agagtttgatcatggctcaggacgaacgctggcggcgtgcttaacacatgcaagtcgaacgagaatggttgggagcttgcttctggctattcgagtggcggacgggtgagtaacgcgtgagcaacctgtctcacacaggggaataacgcatcgaaagatgtgctaataccgcataggaccacgggaggacatccttctgaggtgaaaggagcaatccggtgtgaggtgggctcgcgtctgattagatagttggtgaggtaacggcccaccaagtcaacgatcagtagccgacctgagagggtgatcggccacattgggactgagacacggcccagactcctacgggaggcagcagtggggaatattgggcaatgggcgcaagcctgacccagcaacgccgcgtgaaggaagaaggttttcggatcgtaaacttctgtccttggtgaagagaagaagacggtagctaaggaggaagccccggctaactacg

SEQ ID NO: 7663 - DNA, 490 bp, unidentified
  misc_feature 1..490: note = Ascusbbf_287603, encodes 16S rRNA
  source 1..490: mol_type = genomic DNA
agagtttgatcatggctcagaacgaacgctggcggcgcgtcttaagcatgcaagtcgggcgggattccccagcttgctggggatgagagcggcggactggtgagtaacgcgtgggcgacgcgccccgtggaccgggatagcctgtggaaacacagggtaataccgggcgagctcccccgcgccggaggcgggggaggaaaggagccgaggctccgccacgggagcggcccgcgtcccatcagctggatggcggtgcaagggaccaccatggctatgacgggtacccggcctcagagggcgaccgggcacattgggactgagatacggcccagactcctacgggaggcagcagctaagaatattccgcaatggggggaaccctgacggagcgacgccgcgtggacgaggaaggccggaaggttgtaaagtccttttcgcgccgaggaaggagccggggagggaatgccccggcggtgactgtaggcgggga

SEQ ID NO: 7664 - DNA, 490 bp, unidentified
  misc_feature 1..490: note = Ascusbbf_212323, encodes 16S rRNA
  source 1..490: mol_type = genomic DNA
agagtttgatcctggctcaggatgaacgctggcggcgtgcttaacacatgcaagtcgaacgattaaagccccttcgggggtgtatagagtggcgaacgggtgagtaacacgtgagcaacctaccttctgttctgggataacttgaggaaactcaagctaataccggatattccgtctgctccgcatggtgcggatgggaaagcgcatacgacagaagatgggctcgcgtcccattagctagttggtagggtaatggcctaccaaggcgatgatgggtagccgggttgagagaccgaccggccacattgggactgagacacggcccaaactcctacgggaggcagcagtggggaattttgcgcaatgggcgaaagcctgacgcagcaacgccgcgtgcgggatgaaggccttcgggttgtaaaccgctttcagtagggaagattatgacggtacctacagaagaagctccggctaactacgtgccagcagc

SEQ ID NO: 7665 - DNA, 490 bp, unidentified
  misc_feature 1..490: note = Ascusbbf_1897320, encodes 16S rRNA
  source 1..490: mol_type = genomic DNA
agagtttgatcatggctcaggatgaacgctagcggcaggcttaacacatgcaagtcgaacgagaaagcaccttcgggtgtaagtagagtggcgaacgggtgagtaacacgtgagcaacctgcctttcactttggaataactcagagaaatttgtgctaataccaaatactccgtatctttcgcatgattaatacgggaaagcttttgcggtgaaagatgggctcgcggcccattagatagttggtggggtgacggcctaccaagtcgacgatgggtagccgggttgagagaccgaccggccacattggaactgagacacggcccagactcctacgggaggcagcagtggggaattttgcgcaatgggggaaaccctgacgcagcaacgccgcgtgcgggatgaaggccttcgggttgtaaaccgctttcagtagggaagaaaatgacggtacctacagaagaagctccggctaactacgtgccagcagcc

SEQ ID NO: 7666 - DNA, 472 bp, unidentified
  misc_feature 1..472: note = Ascusbbf_1341268, encodes 16S rRNA
  source 1..472: mol_type = genomic DNA
agagtttgatcctggctcagagcgaacgctggcggcaggcttaacacatgcaagtcgcacgaaggggtcggcctgagtggcggacgggtgaggaacgcggaggaagcgatccaggggtgggggagaactctgggaaactggagcgaagaccgcaggatacctgagggtcaaaggcgcaagtcgcctgtggaggagcctgcgttcgatgagcttgttggtggggtaatggcctaccaaggcgatgatcgatagctggtctgagaggaggatcagccacactgggactgagacacggcccagactcctacgggcggcagccgtggggactcttggccactgggggcctccctgctcccgcgctgccgcgtgtgtgaagacggttttcggcttgtacagcactttcggcggggacgatgatgaccgtacccgcagaagacgccccggctaacttcgtgccagcagccgcggtaat

SEQ ID NO: 7667 - DNA, 490 bp, unidentified
  misc_feature 1..490: note = Ascusbbf_58941, encodes 16S rRNA
  source 1..490: mol_type = genomic DNA
agagtttgatcctggctcaggatgaacgctagctacaggcctaacacatgcaagtcgaggggcagcatggagaaagcttgctttctctgatggcgaccggcgaatgggtgagtcacgcgtgtccaacctgccccccgcccggggatagcccttggaaatgaggattaagacccgatatgtggcgcctccgcatggcggcgccatgaagcaggcaggggatggggacgcgtcggattagctggacggcggggcaaaggcccaccgtggcgacgatccgcaggggttctgagaggaaggtcccccacactggcactgagacacgggccagactcctacgggaggcagcagtgaggaatattggtcaatggccgcgaggctgaaccagccaagtagcgtgcaggacgacggccctacgggttgtaaactgctttttcgggaggataaaggacgtcacgtgtggcgttttgcaggtatcccgtgaataaggacc

SEQ ID NO: 7668 - DNA, 490 bp, unidentified
  misc_feature 1..490: note = Ascusbbf_20959, encodes 16S rRNA
  source 1..490: mol_type = genomic DNA
agagtttgatcatggctcaggatgaacgctagcggcaggcttaacacatgcaagtcgaggggcagcgggagtagcaatacttgccggcgaccggcggaagggtgcgtaacgcgtgagcaacttgcccgtatctgggggataagcgatggaaacgtcgtctaataccgcgtaacaactgaggccgcatgaccttagtttgaaagcttcggcggatacggataggctcgcgagacattagctagttggagtggtaacggcacaccaaggcgacgatgtctaggggttctgagaggaaggtcccccacattggaactgagacacggtccaaactcctacgggaggcagcagtgaggaatattggtcaatggccggaaggctgaaccagccatgccgcgtgcaggattaaggccctatgggtcgtaaactgcttttgtggtggagcaataaggcgtacgcgtacgccgatgagagtacatcacgaataagcatc

SEQ ID NO: 7669 - DNA, 490 bp, unidentified
  misc_feature 1..490: note = Ascusbbf_49736, encodes 16S rRNA
  source 1..490: mol_type = genomic DNA
agagtttgatcctggctcaggattaacgctggcggcatgcctaatacatgcaagtcgaatggggagcttgcttcccatggcgaacgggtgagtaatacgtaggtaacctacctttaggacgaggataacctttggaaacgaaggataatactggatagtatagatttccgcatggagatatatttaaagatttatcacctagagaggggcctgcggtgcattagctagttggcgggataaaagcccaccaaggcgatgatgcatagccggactgagaggttgtacggccacaatggaactgagaacggtccatactcctacgggaggcagcagtagggaattttcggcaatgggcggaagcctgaccgagcaatgccgcgtgaatgatgaagtatttcggtatgtaaagttcttttatctaggaagaaaaaacaaattgacggtactagatgaataagctccggctaactacgtgccagcagccgcggta

SEQ ID NO: 7670 - DNA, 490 bp, unidentified
  misc_feature 1..490: note = Ascusbbf_205742, encodes 16S rRNA
  source 1..490: mol_type = genomic DNA
agagtttgatcatggctcaggatgaacgctagcggcaggcttaacacatgcaagtcgaggggcagcgggctgtagcaatacggtgccggcgaccggcggacgggtgcgtaacgcgtatgcaacctgcccggcacaggggaatagcccggcgaaagccggagtaatgccccatggttccagcatcccgcatggggagctggataaacccgcgagggggtgccggatgggcatgcgtggcattaggcagttggcggggtaacggcccaccaaaccgacgatgcctaggggtcctgagagggaggtcccccacattggaactgagacacggtccaaactcctacgggaggcagcagtgaggaatattggtcaatggaggcaactctgaaccagccatgccgcgtgcaggaagacggccttatgggttgtaaactgcttttgttcgggacgagcatgaatacgagtattcaagtgacggtaccggaagaataag

SEQ ID NO: 7671 - DNA, 490 bp, unidentified
  misc_feature 1..490: note = Ascusbbf_25029, encodes 16S rRNA
  source 1..490: mol_type = genomic DNA
agagtttgatcatggctcaggacgaacgctggcggcgtgcctaacacatgcaagtcgaacggagattaagatttcggttttaatctgagtggcgaacgggtgagtaacgcgtgagcaacctgcccttcagagggggataaccgctggaaacagcagctaataccgcataagaccacagcccggcatcggggaggggtcaaaggagcaatccgctgaaggaggggctcgcgtcccattagatagttggcgggataacagcccaccaagtcgacgatgggtagccgagctgagaggctgatcggccacactggaactgagacacggtccagactcctacgggaggcagcagtggggaatattgggcaatgggcgcaagcctgacccagcaacgccgcgtgagggaagaaggctttcgggttgtaaacctctgtccttggtgacgaagaagtgacggtagccaaggaggaagccccggctaactacgtgccag

SEQ ID NO: 7672 - DNA, 490 bp, unidentified
  misc_feature 1..490: note = Ascusbbf_134097, encodes 16S rRNA
  source 1..490: mol_type = genomic DNA
agagtttgatcctggctcaggacgaacgctggcggcgtgcctaacacatgcaagtcgaacggactgattcccttcggggatgaaagttagtggcggacgggtgagtaacgcgtgagcaacctgcctttcagaggggaataacgtttggaaacagacgctaataccgcataacgcataggtgtcgcatggcatttatgccaaaggagcaatccgctgaaagatgggctcgcgtccgattagatagttggtggggtaacggcctaccaagtcgacgatcggtagccggactgagaggttgaacggccacattgggactgagacacggcccagactcctacgggaggcagcagtgggggatattgcacaatgggcgcaagcctgatgcagcaacgccgcgtgagggaagacggttttcggattgtaaacctctgtctttggtgacgaagaaatgacggtagccgaggaggaagccacggctaactacgtgcca

SEQ ID NO: 7673 - DNA, 490 bp, unidentified
  misc_feature 1..490: note = Ascusbbf_700317, encodes 16S rRNA
  source 1..490: mol_type = genomic DNA
agagtttgatcatggctcaggacgaacgctggcggcacgcttaacacatgcaagtcgaacggagttattgagagcttgcttttaataacttagtggcggacgggtgagtaacacgtgagcaatctgcctttcagagggggatagcagttggaaacgactgataataccgcataatatagtaggatcgcatgatttaactatcaaagatttatcgctgaaagatgagctcgcgtctgattagatagttggtgaggtaacggctcaccaagtcgacgatcagtagccggactgagaggttgaacggccacattgggactgagacacggcccagactcctacgggaggcagcagtggggaatattgcacaatgggcgcaagcctgatgcagcgatgccgcgtgagggaagaaggttttaggattgtaaacctctgtcttcagggacgataatgacggtacctgaggaggaagctccggctaactacgtgccag

SEQ ID NO: 7674 - DNA, 490 bp, unidentified
  misc_feature 1..490: note = Ascusbbf_110970, encodes 16S rRNA
  source 1..490: mol_type = genomic DNA
agagtttgatcctggctcaggatgaacgctagcggcaggcttaacacatgcaagtcgaggggcagcacgtcttcggatggtggcgaccggcgcacgggtgagtaacgcgtatgcaatctaccttttacaggggcatagcccggggaaacccggattaatatcctatagtaccaagatatagcattatactttggttaaagcttcggcggtaaaagatgagcatgcgtcctattagctagatggtaaggtaacggcttaccatggctatgataggtaggggtcctgagagggagaccccccacactggtactgagacacggaccagactcctacgggaggcagcagtgaggaatattggacaatgggcgagagcctgatccagccatgccgcgtgcaggaagacggccctatgggttgtaaactgcttttacagaggaagaaacaccccctcgtgagggggcttgacggtactctgcgaataaggatcggc

SEQ ID NO: 7675 - DNA, 490 bp, unidentified
  misc_feature 1..490: note = Ascusbbf_497791, encodes 16S rRNA
  source 1..490: mol_type = genomic DNA
agagtttgatcatggctcaggacgaacgctggcggcgtgcctaacacatgcaagtcgagcgaggacgaggggcttcggtcccgagttcgagcggcggacgggtgagtaacgcgtgaacaatctgtcccatacagggggataccacttggaaacaggtgctaataccgcataagaccacgcagccgcatggctaaggggtaaaagggataccggtatggggtgagttcgcgtccgattagatagttggtgaggtaacggcccaccaagtcaacgatcggtagccgacctgagagggtgatcggccacattggaactgagagacggtccaaactcctacgggaggcagcagtgggaatattgggcaatgggcgaaagcctgacccagcaacgccgcgtgagggaagaaggttttcggattgtaaacctctatcgtagaggacgaagagaatgacggtactctacaaggaagccccggctaactacgtgccag

SEQ ID NO: 7676 - DNA, 490 bp, unidentified
  misc_feature 1..490: note = Ascusbbf_119736, encodes 16S rRNA
  source 1..490: mol_type = genomic DNA
agagtttgatcctggctcaggatgaacgctggcggcgtgcttaacacatgcaagtcgaacggagtatgttaaccgaagtcttcggacttcacctgatatacttagtggcggacgggtgagtaacgcgtgagcaaccaacctcatacagggggataacaattagaaatgattgctaataccccataagaccacagcaccgcatgatgcagtgagaaaaactccggtggtatgagacgggctcgcgttcgattagcttgatggtgaggtaacggcccaccatggcgacgatcgatagccggactgagaggtcgaccggccacattgggactgagacacggcccagactcctacgggaggcagcagtggggaatattgcacaatgggggaaaccctgatgcagcgacgccgcgtgagtgaagaagtatttcggtatgtaaagctcttttagcagggaagaagatgacggtacctgcagaaaaagccccggcta

SEQ ID NO: 7677 - DNA, 490 bp, unidentified
  misc_feature 1..490: note = Ascusbbf_160534, encodes 16S rRNA
  source 1..490: mol_type = genomic DNA
agagtttgatcctggctcaggatgaacgctggcggcgtgcctaacacatgcaagtcgaacgatgaagccggcttcggccgggtatgaagtggcgaacgggtgagtaacacgtgaccaacctgccccgcgccccgggatagcctcgagaaatcgggattaacaccggatactccgcgggccccgcatggggccggcgggaaagctttgcggcgcgggatggggtcgcggcccattaggtagcaggcggggtgacggcccacctggccgacgatgggtagccgggttgagagaccgaccggccacattgggactgagatacggcccagactcctacgggaggcagcagtggggaatattgcgcaatgggcgcaagcctgacgcagcaacgccgcgtgcgggaagaaggccctcgggttgtaaaccgctttcagcagggaagatcgtgacggtacctgcagaagaagccccggctaactacgtgccagcagcc

SEQ ID NO: 7678 - DNA, 490 bp, unidentified
  misc_feature 1..490: note = Ascusbbf_679237, encodes 16S rRNA
  source 1..490: mol_type = genomic DNA
agagtttgatcctggctcaggatgaacgctagcggaaggcctaacacatgcaagccgagcgggatttatttattagcttgctaataaataatgagagcggcgtacgggtgcggaacacgtgtgcaacctgcctttatctgggggatagccattcgaaaggatgattaatgccccataatatattgaatggcatcatttgatattgaaagctccggcggatagagatgggcacgcgcaagattagatagttggtgaggtaacggctcaccaagtcaatgatctttaggggtcctgagagggagatcccccacactgggactgagacacggcccagactcctacgggaggcagcagtgaggaatattggacaatgggtggaagcctgatccagccattccgcgtgcaggaagacggtcctatggattgtaaactgcttttatatagggataaacctactctcgtgagagtagctgaaggtactatatgaata

SEQ ID NO: 7679 - DNA, 490 bp, unidentified
  misc_feature 1..490: note = Ascusbbf_313244, encodes 16S rRNA
  source 1..490: mol_type = genomic DNA
agagtttgatcatggctcaggatcaacgctggcggcgtgcctaatgcatgcaagtcgaacggggtctccttcgggggactcacgtggcggacgggtgaggaacacgtggccaatctgcccaccggcagggggtagcccgcggaaacgcggggtaattccgtatacgctcaggatccgagtggggatgctgaggaaagggtcttcggactcgccggtggaggaggctgcgaccgattagctggttggtggggtaacggcctaccaaggcgatgatcggtagctggtctgagaggatgatcagccacacggggactgagacacggccccgactcctacgggaggcagcagcaaggaattttccgcaatgggcgaaagcctgacggagcaacgccgcgtgcgggatgacgcttttcggagtgtaaaccgctgttcgtggggacgaagcactgacggtacccacggaggaaggcccggctaactacgtgccagc

SEQ ID NO: 7680 - DNA, 490 bp, unidentified
  misc_feature 1..490: note = Ascusbbf_980139, encodes 16S rRNA
  source 1..490: mol_type = genomic DNA
agagtttgatcatggctcaggacgaacgctggcggcgtgcttaatacatgcaagtcgaacggagatattccgccgatggagatttcggtcgaagtcatggagtatcttagtggcgaacgggtgagtaacgcgtgaacagcctgactcaaagagggggataacaacgggaaactgttgctaataccgcataagaccacagtgtcgcatggcacaggggtcaaagatttatcgctttgagaggggttcgcgtcccattaggtagttggaggggtaacggcccaccaagccgacgatgggtagccgagctgggaggctgatcggccacactggaactgagacacggtccagactcctacgggaggcagcagtagggaatattgggcaatgggcgcaagcctgacccagcaacgccgcgtgagggaagaaggttttcggattgtaaacctctgtcctatgtgacgaaggaagtgacggtagcataggaggaagc

SEQ ID NO: 7681 - DNA, 490 bp, unidentified
  misc_feature 1..490: note = Ascusbbf_1717350, encodes 16S rRNA
  source 1..490: mol_type = genomic DNA
agagtttgatcctggctcaggatgaacgctggcggcgtgcctaacacatgcaagtcgaacgaagcacttctcccgttgaagcagaatagcttgctaggaagtggaaacatttgaagtgacttagtggcggacgggtgagtaacgcgtgggtaacctgccctgtactgggggacaacagttggaaacggctgctaataccgcataagcgcacgatgtcgcatggcattgtgtgaaaaactccggtggtacaggatggacccgcgtctgattagctagttggtggggtaacggcctaccaaggcgacgatcagtagccggcctgagagggtgaacggccacattgggactgagacacggcccagactcctacgggaggcagcagtggggaatattgcacaatgggcgcaagcctgatgcagcgacgccgcgtgagtgatgaagtatttcggtatgtaaagctctatcagcagggaagaaaatgacggtacct

SEQ ID NO: 7682 - DNA, 490 bp, unidentified
  misc_feature 1..490: note = Ascusbbf_152575, encodes 16S rRNA
  source 1..490: mol_type = genomic DNA
agagtttgatcctggctcaggatgaacgctagctacaggcttaacacatgcaagtcgaggggcagcatggtattagcttgctaataccgatggcgaccggcggatgggtgcgtaacgcgtatccaacctgcctgtgtcccgggcatagcccgtggaaacgcggattaactcccgatggtgcagacgtgccgcatggcgtgtctgccaaatgcgaaggacacagatggggatgcgtaccattaggtagtcggcggggtaacggcccaccgagccatcgatggttaggggttctgagaggaaggtcccccacactggtactgagacacggaccagactcctacgggaggcagcagtgaggaatattggtcaatggccgagaggctgaaccagccaagtagcgtgcaggatgacggccctacgggttgtaaactgcttttatgcggggataaagattcgcacgtgtgcgaagttgcaggtaccgcatgaataa

SEQ ID NO: 7683 - DNA, 490 bp, unidentified
  misc_feature 1..490: note = Ascusbbf_139966, encodes 16S rRNA
  source 1..490: mol_type = genomic DNA
agagtttgatcatggctcaggatgaacgctggcggcgtgcctaacacatgcaagtcgaacggagatttttcaccaaaacggaagttagcttgctaaccgaagttttaccgagagatcttagtggcggacgggtgagtaacgcgtgaggaacctgcctttcagagggggataacgtcttgaaaaggacgctaataccgcataacatatctttgcggcatcacagagatatcaaaggagcaatccgctgaaagatggcctcgcgtccgattagccagttggcggggtaacggcccaccaaagcgacgatcggtagccggactgagaggttgaacggccacattgggactgagacacggcccagactcctacgggaggcagcagtggggaatattgcacaatgggcgaaagcctgatgcagcaacgccgcgtgagggaagaaggttttcggattgtaaacctctgtcccctgtgacgaagacagtgacggtag

SEQ ID NO: 7684 - DNA, 490 bp, unidentified
  misc_feature 1..490: note = Ascusbbf_87107, encodes 16S rRNA
  source 1..490: mol_type = genomic DNA
agagtttgatcatggctcaggatgaacgctggcggcgtgcctaatacatgcaagtcgagcgagacggagaagatgaagcttcggtagattcctctcccgaaagcggcggacgggtgagtaacgcgtaggcaacctgccccttgcacagggatagccattggaaacgatgattaatacctgataacgcgcatatgatgcatatcacatgtgccaaagattcatcggcaagggatgggcctgcgtctgattagctggttggtgaggtaacggcccaccaaggcgacgatcagtagccgacctgagagggtgatcggccacattggaactgagacacggtccaaactcctacgggaggcagcagtagggaattttgcacaatgggcgcaagcctgatgcagcaacgccgcgtgaaggatgaaggccttcgggttgtaaacttctgttcttagggaagaagaaagtgacggtacctaaggagcaagccccggct

SEQ ID NO: 7685 - DNA, 490 bp, unidentified
  misc_feature 1..490: note = Ascusbbf_192477, encodes 16S rRNA
  source 1..490: mol_type = genomic DNA
agagtttgatcatggctcaggatgaacgctggcggcgtgcttaacacatgcaagtcgaacggagtattcctccctggaaccgatgtagcttgctacggaagttccttttggaatacttagtggcggacgggtgagtaacgcgtgagtaacctgcccttcagtggggaataacatcgagaaatcggtgctaataccgcataacgtcagaggaccgcatgatcttctgaccaaaggatttattcgctgaaggatggactcgcgtccgattagctagttggtgaggtaacggcccaccaaggcgacgatcggtagccgaactgagaggttgatcggccacattgggactgagacacggcccagactcctacgggaggcagcagtggggaatattgggcaatgggcgaaagcctgacccagcaacgccgcgtgaaggatgaaggtcttcggattgtaaacttctttgatcagggacgaaattttgacggtacct

SEQ ID NO: 7686 - DNA, 490 bp, unidentified
  misc_feature 1..490: note = Ascusbbf_1541142, encodes 16S rRNA
  source 1..490: mol_type = genomic DNA
agagtttgatcctggctcaggatgaacgctggcggcatgcctaagacatgcaagtcgtacgaggtggcccattgaaaaatgcgtgcttgcacaaatttggatttggattttccacctagtggcgcaagggtgagtaacacgtaggttatctgccttcgagactgggataacaattggaaacgattgctaataccggatgatatatagttggatacgtccttctatattaaaaggagcctttaaagcttcacttgaagatgagcctgcggcgtattagctagttggtgaggtaatggctcaccaaggcaacgatgcgtagccgaactgagaggttgatcggccacattgggactgagacacggcccaaactcctacgggagacagcagttaggaatattcgtcaatgggggcaaccctgaacgagcaatgccgcgtgagtgatgacggtcctttggattgtaaaactctgttgtttggaaagaacgaccta

SEQ ID NO: 7687 - DNA, 490 bp, unidentified
  misc_feature 1..490: note = Ascusbbf_1872059, encodes 16S rRNA
  source 1..490: mol_type = genomic DNA
agagtttgatcatggctcaggacgaacgctggcggcgtgcctaatacatgcaagtcgagcggaccgaacgagagcttgctcttgtttggtcagcggcggacgggtgagtaacacgtgggcaacctgcccgcaagaccgggataactccgggaaaccggagctaataccggataacaccaaagaccgcatggtctttggttgaaaggcggcttcggctgtcacttgcggatgggcccgcggcgcattagctagttggtggggtaacggctcaccaaggcgacgatgcgtagccggcctgagagggtgaccggccacactgggactgagacacggcccagactcctacgggaggcagcagtagggaatcttccgcaatggacgaaagtctgacggagcgacgccgcgtgagcgaagaaggccttcgggtcgtaaagctctgttgtgagggacgaaggagcgccgtttgaataaggcggcgcggtgacggtac

SEQ ID NO: 7688 - DNA, 490 bp, unidentified
  misc_feature 1..490: note = Ascusbbf_1535443, encodes 16S rRNA
  source 1..490: mol_type = genomic DNA
agagtttgatcatggctcaggatgaacgctggcggcgtgcttcacacatgcaagtcgaacggaaaggcatcttcgggtgtactcgagtggcgaacgggtgagtaacacgtgagtaatctgcctttagctttgggataagcctcggaaacggggtctaatactggatatgacttgctcctgcatgggggtgggtggaaagtttttcggctagagatgggctcgcggtctatcagcttgttggtggggtaatggctcaccaaggctttgacgggtagccggcctgagagggcgaccggccacactgggactgagacacggcccagactcctacgggaggcagcagtggggaatattgcacaatgggcggaagcctgatgcagcgacgccgcgtgagggatgacggccttcgggttgtaaacctctttcagcagggacgaagcgcgagtgacggtacctgcagaagaagcgccggctaactacgtgccagcag

SEQ ID NO: 7689 - DNA, 490 bp, unidentified
  misc_feature 1..490: note = Ascusbbf_371679, encodes 16S rRNA
  source 1..490: mol_type = genomic DNA
agagtttgatcctggctcaggatcaacgctggcggcgtgcctaatgcatgcaagtcgaacggggtcatcttcggatggcttacgtggcggacgggtgaggaacacgtgggtaacctgcccagtggtgggggctagccttcggaaacggagggtaattccgcataaggtctttggtcgagtgggatcgaagacgaaagccgcaaggcgccgctggaggggcccgcgtccgattagctagatggtggggtaacggctcaccatggcgatgatcggtagctggtttgagaggatgatcagccacacggggactgagacacggccccgactcctacgggaggcagcagcaaggaattttccgcaatgggcgaaagcctgacggagcaacgccgcgtgcgggatgacgcttttcggagtgtaaaccgctgttcgtggggacgaagcactgacggtacccacggaggaaggcccggctaactacgtgccagcagcc

SEQ ID NO: 7690 - DNA, 490 bp, unidentified
  misc_feature 1..490: note = Ascusbbf_1592556, encodes 16S rRNA
  source 1..490: mol_type = genomic DNA
agagtttgatcctggctcaggatgaatgctggcggcgtgcctaatacatgcaagtcgagcggtaacagggggtctcaccgtttccttgacactcctggcctttgagcaggaggttgaattcgagggaacagtgagaccctgctgacgagcggcggacggctgagtaacgcgtgggaacggaccccaaactgagggataactagtcgaaagattagctaataccgcatgtgatcttcggattaaaggatttatccggtttgggactggcctgcgtacgattagatagttggtagggtaatggcctatcaagtcgacgatcgttagatggtttgagaagatgatcatccagactgggactgagacacggcccagactcctacgggaggcagcagtagggaatctttcacaatgggcgaaagcctgatggagcaacgccgcgtgcaggatgacggccttcgggttgtaaactgcttttataagcgagaaatat

SEQ ID NO: 7691 - DNA, 490 bp, unidentified
  misc_feature 1..490: note = Ascusbbf_14971, encodes 16S rRNA
  source 1..490: mol_type = genomic DNA
agagtttgatcatggctcaggacgaacgctggcggcgtgcctaacacatgcaagtcgaacgaagcttgatgaatgaattcttcggaatgatttctgatatgacttagtggcggacgggtgagtaacgcgtgagcaacctgcctttcagagggggatagcgtttggaaacgaacgataataccgcataacatcattttactgcatggtagaatgatcaaaggagtaatccgctgaaagatgggctcgcgtctgattagatagttggtggggtaacggcccaccaagtcgacgatcagtagccggactgagaggttgaacggccacattgggactgagacacggcccagactcctacgggaggcagcagtggggaatattgcacaatgggggaaaccctgatgcagcaacgccgcgtgagggaagacggttttcggattgtaaacctttgtctttggtgaagaagaagtgacggtagccaaggaggaagcca

SEQ ID NO: 7692 - DNA, 490 bp, unidentified
  misc_feature 1..490: note = Ascusbbf_282027, encodes 16S rRNA
  source 1..490: mol_type = genomic DNA
agagtttgatcctggctcaggatgaacgctggcggcatgcctaagacatgcaagtcgaacgaagtggcccaacaaagactgcgtacttgtacaaggttggcgatggatttccacttagtggcagacgggtgagtaacacgtaagtaatctaccctcgagtttggaataatgtctggaaacggacactaataccggataattcatatttagataactagatatgctaaaaggagcgtttgcttcgcttgaggatgagcttgcggcgtattaactagttggtgaggtaatggctcaccaaggtgacgatgcgtagccgaactgagaggttgatcggccacattgggactgagacacggcccaaactcctacgggaggcagcagttaggaatattcgtcaatgggggaaaccctgaacgagcaatgccgcgtgagtgatgacggtctttatgattgtaaaactctgttgtaaggaacgaacccttaggatagg

SEQ ID NO: 7693 - DNA, 490 bp, unidentified
  misc_feature 1..490: note = Ascusbbf_1570261, encodes 16S rRNA
  source 1..490: mol_type = genomic DNA
agagtttgatcatggctcaggatgaacgctagcggcaggcctaatacatgcaagtcggacgggatccatcggcgggcttgcccaatgatggtgagagtggcgcacgggtgcgtaacgcgtgagcaacctgcccctgtcaggggtatagcctctcgaaagagagattaagaccgcatatgataccgttccggcatcggatcgatatgaaatattcataggacagggatgggctcgcgtgacattagctggttggtggggtaacggcccaccaaggcgacgatgtctaggggctctgagaggggaatcccccacactggtactgagacacggaccagactcctacgggaggcagcagtaaggaatattggtcaatgggcggaagcctgaaccagccatgccgcgtgcgggacgaaggccctacgggtcgtaaactgcttttgtacgggaacaaccgcagttacgcgtaactgtctgagtgtaccgtaagaat

SEQ ID NO: 7694 - DNA, 490 bp, unidentified
  misc_feature 1..490: note = Ascusbbf_1794449, encodes 16S rRNA
  source 1..490: mol_type = genomic DNA
agagtttgatcatggctcaggacgaacgctggcggcgtgcctaatacatgcaagtcgaggggcagcgggttgtagcaatacaatgccgacgaccggcgaaagggtgagtaacgcgtgagcaacatgcccgatactggaggatagtcgatggaaacgtcgcgtaatactccgtaacaacagagatcgcatggtctttgtttaatagatttatcggtatcggattggctcgcgtaccattagctagttggcggggtaacggcccaccaaggcgacgatggttaggggttctgagaggaaggtcccccacattggaactgagacacggtccagactcctacgggaggcagcagtgaggaatattggtcaatggccgagaggctgaaccagccatgccgcgtgcgggaggacggccctatgggttgtaaaccgcttttgttggggagcaataaggagcacgagtgcttcgatgagagtacccagcgaataagca

SEQ ID NO: 7695 - DNA, 490 bp, unidentified
  misc_feature 1..490: note = Ascusbbf_1702796, encodes 16S rRNA
  source 1..490: mol_type = genomic DNA
agagtttgatcatggctcaggatgaacgctggcggcgtgcttaacacatgcaagtcgaacgaagctctttgaacggaggattcgtctgaagtgatgagatgacttagtggcggacgggtgagtaacgcgtgggtaacctgccgtatgcagggggacaacagttggaaacgactgctaataccgcataagcgcacgtgaccgcatggtcgagtgtgaaaagatttatcggcatacgatggacccgcgtctgagtagatagttggtgaggtaacggctcaccaagtcgacgatcagtagccggcctgagagggtgaacggccacattgggactgagacacggcccaaactcctacgggaggcagcagtggggaatattgcacaatgggggaaaccctgatgcagcgacgccgcgtgagtgaagaagtatttcggtatgtaaagctctatcagcagggaagaaaatgacggtaccagactaagaagccccggc

SEQ ID NO: 7696 - DNA, 490 bp, unidentified
  misc_feature 1..490: note = Ascusbbf_1176295, encodes 16S rRNA
  source 1..490: mol_type = genomic DNA
agagtttgatcctggctcaggatgaacgccggcggtgtgcctaatacatgcaagtcgagcgcactggcccaacagaaatgacgtgcttgcactgatttgacgttggattcccagtgagcggcggacgggtgagtaacacgtgggcaacctgccccaaagcgggggataacatttggaaacaggtgctaataccgcataacttggaaaaccacatggttttccaataaaagatggtttcggctatcactttgggatgggcccgcggtgcattagctagttggtaaggtaacggcttaccaaggcgatgatgcatagccgagttgagagactgatcggccacaatggaactgagacacggtccatactcctacgggaggcagcagtagggaatcttccacaatgggcgcaagcctgatggagcaacaccgcgtgagtgaagaagggtttcggctcgtaaaactctgttgttggagaagaacgtgcgtaagag

SEQ ID NO: 7697 - DNA, 490 bp, unidentified
  misc_feature 1..490: note = Ascusbbf_631299, encodes 16S rRNA
  source 1..490: mol_type = genomic DNA
agagtttgatcatggctcaggatgaacgctagcgggaggcctaacacatgcaagccgagcggtagagtctcttcggagacttgagagcggcgcacgggtgcggaacacgtgtgcaacctgcctttatctgggggatagcctttcgaaaggaagattaataccccataatatactggatggcatcatctggtattgaaaactccggtggatagagatgggcacgcgcaagattagatagttggtgaggtaacggctcaccaagtcagcgatctttagggggcctgagagggtgatcccccacactggtactgagacacggaccagactcctacgggaggcagcagtgaggaatattggacaatgggtgagagcctgatccagccatcccgcgtgaaggacgacggccctatgggttgtaaacttcttttgtatagggataaacctagatacgtgtatctagctgaaggtactatacgaataagcaccggct

SEQ ID NO: 7698 - DNA, 490 bp, unidentified
  misc_feature 1..490: note = Ascusbbf_281462, encodes 16S rRNA
  source 1..490: mol_type = genomic DNA
agagtttgatcatggctcaggacgaacgctggcggcgtgcttaacacatgcaagtcgaacgagaatttggcggactgaacttacgggagagggaagccgaagggaagtggcgaacgggtgagtaacacgtgagcaacctgccttacacaaagggatagccactggaaacggtgattaataccatatgagaccacaaactcgcatgagaaaggggttaaagaaattcggtgtaagatgggctcgcgtctgattagctagttggaagggtaaaggcctaccaaggcgacgatcagtagccggtctgagaggatgaacggccacactggaactgagacacggtccagactcctacgggaggcagcagtggggaatattgcacaatgggggaaaccctgatgcagcgacgccgcgtgagcgaagaaggttttcgaatcgtaaagctctgtcctatgagaagataatgacggtatcataggaggaagccccggct

SEQ ID NO: 7699 - DNA, 490 bp, unidentified
  misc_feature 1..490: note = Ascusbbf_1577816, encodes 16S rRNA
  source 1..490: mol_type = genomic DNA
agagtttgatcatggctcaggatgaacgctggcggcgtgcctaatacatgcaagtcgaacggagtcggtttggaaagtccttcgggactggaattatcgacttagtggcggacgggtgagtaacgcgtgagcaatctgcctttgagagggggataacagccggaaacggctgctaataccgcatgaagcatttggaccgcatgatctggatgccaaagattttatcgctcaaagatgagctcgcgtcccattagctggttggcggggtaacggcccaccaaggcgacgatgggtagccggactgagaggttgaacggccacattgggactgagacacggcccagactcctacgggaggcagcagtagggaatattgcgcaatgggggcaaccctgacgcagcaacgccgcgtgattgatgaaggtcttcggattgtaaaaatctttaatcagggacgaaaaacgacggtacctgaagaataagctccggc

SEQ ID NO: 7700 - DNA, 490 bp, unidentified
  misc_feature 1..490: note = Ascusbbf_1884640, encodes 16S rRNA
  source 1..490: mol_type = genomic DNA
agagtttgatcatggctcaggatgaacgctggcggcgtgcttaacacatgcaagtcgaacgaggaataggatgaagttttcggatggattcttattccgagtggcggacgggtgagtaacgcgtgggtaacctgccctgtacagggggataacagttggaaacgactgttaataccgcataagaccacagtgccgcatggcacaagggtaaaaactccggtggtacaggatggacccgcgtccaattagatagttggtgaggtaacggcccaccaagtcgacgattggtagccgatctgagaggacgaacggccacattgggactgagacacggcccagactcctacgggaggcagcagtggggaatattgggcaatgggcgcaagcctgacccagcaacgccgcgtgaaggatgaaggttttcggattgtaaacttcttttaagtgggacgatgatgacggtaccacttgaataagccccggctaacta

SEQ ID NO: 7701 - DNA, 490 bp, unidentified
  misc_feature 1..490: note = Ascusbbf_529778, encodes 16S rRNA
  source 1..490: mol_type = genomic DNA
agagtttgatcatggctcaggatgaacactggcggcgtgcctaacacatgcaagtcgaacgaagccctttgagtggggatttcggttgaagcgaggaggtgactgagtggcggacgggtgagtaacgcgtggagaacctggcccatacagggggatagcggctggaaacggccggtaaaaccgcataagcgcacaagcagggcatcctgtggtgtgaaaatctattgaggtatgggatggatccgcgtccgattagccagtaggcggggtaacggcccacctaagcaacgatcggtagccggcctgagagggcggacggccacattgggactgagacacggcccagactcctacgggaggcagcagtgggggatattgcacaatgggggaaaccctgatgcagcgacgccgcgtgggtgaagaagtatttcggtacgtaaagccctatcgacagggaagaaagaagacggtacctgagtaagaagccccg

SEQ ID NO: 7702 - DNA, 490 bp, unidentified
  misc_feature 1..490: note = Ascusbbf_1423769, encodes 16S rRNA
  source 1..490: mol_type = genomic DNA
agagtttgatcctggctcaggacgaacgctggcggcgtgcctaacacatgcaagtcgaacggggctataccgaatgaagtcttcggatggaataagtatagcttagtggcggacgggtgagtaacgcgtgagcaacctgccttcaggagggggacaacagctggaaacggctgctaataccgcatgacatatatttgcggcatcgcagatatatcaaagatttatcgcctgaagatgggctcgcgtctgattagatagttggtgaggtaacggctcaccaagtcgacgatcagtagccggactgagtggttgaacggccacattgggactgagatacggcccagactcctacgggaggcagcagtgaggagtattgcgcaatgggggcaaccctgacgcagcaacgccgcgtgaaggaagacggttttcggattgtaaacttcttttgtcaaggacgataatgacggtacttgacgaataagccacggct

SEQ ID NO: 7703 - DNA, 490 bp, unidentified
  misc_feature 1..490: note = Ascusbbf_1537382, encodes 16S rRNA
  source 1..490: mol_type = genomic DNA
agagtttgatcatggctcagaatgaacgctggcggcatggattaggcatgcaagtcgaacgagctcccttcggggagaaagtggcgaaagggtgagtaacacgtgagcaacctgcctccggatccggaataatccagggaaacttggtctaaaaccggatgaagaccacagaccgcatggtttatggttaaaatatttatagtccggagaggggctcgcggcccattagcttgttggcggggtaatggcccaccaaggctatgacgggtaggtggtctgagaggatggtcacccacactgggactgagacactgcccagactcctacgggaggctgcagtcgagaatcttccgcaatgggcgcaagcctgacggagcgatgccgcgtgagggatgacggccttcgggttgtaaacctctgtcatccgggacgaaaacaatgacggtaccggaaaaggaagccacggctaaccacgtgccagcagccgcgg

SEQ ID NO: 7704 - DNA, 490 bp, unidentified
  misc_feature 1..490: note = Ascusbbf_1746, encodes 16S rRNA
  source 1..490: mol_type = genomic DNA
agagtttgatcatggctcagaacgaacgctggcggcgcgttttaagcatgcaagtcgagcggtaagccggagcaatccggcctagagcggcggacgggtgagtaacacgtggataatctggcctacagttcgggatagcctggtgaaagccaggataataccggatacgacggttgagtcaaaagagacagccgggaaaggagctaaggcttcgctgaaggatgagtccgcgtcccattagcttgatggtgaggtaaaggcccaccatggcgatgatgggtagccggcctaagagggtgaacggccacattgggactgagatacggcccagactcctacgggaggcagcagctaagaatcttccgcaatggtcgaaagactgacggagcgacgccgcgtgaatgatgaaggccgtgaggttgtaaagttcttttctggagggagaataaggcatgtagggaatgacatgccgatgacgtgaatccaggaa

SEQ ID NO: 7705 - DNA, 490 bp, unidentified
  misc_feature 1..490: note = Ascusbbf_8837, encodes 16S rRNA
  source 1..490: mol_type = genomic DNA
agagtttgatcatggctcaggatgaacgctggcggcgtgcctaacacattcaagtcgaacgagccgtagcaatacggcgagtggcggacgggtgagtaacgcgtaagcaatctgcctttgtgtgcggaataacaaccggaaacagttgctaataccgcatgacgcagcgagaccgcatgatcttgctgccaaagatttatcgcacgaagatgagcttgcgtccgattagatagttggcggggcaacggcccaccaagtcgacgatcggtagccggactgagaggttgaacggccacattggaactgagatacggtccagactcctacgggaggcagcagtggggaatattgggcaatggacgaaagtctgacccagcgacgccgcgtgagggaagaaggtcttcggattgtaaaccttagtcaacagggacgaagcaagtgacggtacctgtggaggaagccacggctaactacgtgccagcagccgcgg

SEQ ID NO: 7706 - DNA, 490 bp, unidentified
  misc_feature 1..490: note = Ascusbbf_23650, encodes 16S rRNA
  source 1..490: mol_type = genomic DNA
agagtttgatcctggctcagagtgaacgctggcggcgtggctaagacatgcaagttgagcgagaatatgcctttgggcatagggaagcggcaaacgggtgagtaacacgtaagtaacctacccttaagactgggatagccctgtgaaagtgggggtaataccggatggagactataactgcatggttatagatcgaaaggtttgtaaaggcgcttaaggaggggcttgcggcctatcagctagttggaggtgtaaaggacccccaaggcgaagacgggtagccggtctgagaggacggacggccacattggaactgagacacggtccaaacatctacggatggcagcagtttcgaattattcacaatgggcgaaagcctgatggtgcgacgtcgcgtggaggaagaaggtcttcggattgtaaactcctgtcattagggagcaaaggctagtggagagctagagttgagttaacctaaagaggaagcagt

SEQ ID NO: 7707 - DNA, 490 bp, unidentified
  misc_feature 1..490: note = Ascusbbf_19488, encodes 16S rRNA
  source 1..490: mol_type = genomic DNA
agagtttgatcatggctcagaataaacgctggcggcgtgtcttaagcatgcaagtcgaacggcaaggtaccttcgggtaccctagagtggcggactggtgagtaacacgtaggtgacgtaccttttggacggggatagcccgtagaaatacgggataataccggataaggttgcacgggttggagccgtgcaaggaaaggcgctacggcgtcgccgaaagaacggcctgcgacctatcagcttgttggtgaggtaaaggcccaccaaggcaatgacaggtatccggcctgagagggtgatcggacacattgggactgagatacggcccagactcctacgggaggcagcagctaagaatattccgcaatggacgaaagtctgacggagcaacgccgcgtggatgatgaaggccggaaggttgtaaaatccttttataattgaggaataagccgggtagggaatgacctggtggtgactgtagattatgaat

SEQ ID NO: 7708 - DNA, 490 bp, unidentified
  misc_feature 1..490: note = Ascusbbf_249242, encodes 16S rRNA
  source 1..490: mol_type = genomic DNA
agagtttgatcatggctcaggatgaacgctggcggcgtgcctaacacatgcaagtcgaacggagcatagacgctgtgagaagaatcagcttgctgaggaagcgaacttgtttatgcttagtggcggacgggtgagtaacgcgtggataacctggctcacacagggggatagcagttggaaacgactgataataccgcataagcgcacggcatcgcatgatgcagtgtgaaaagatttatcggtgtgagatggatccgcgtctgattagccagttggcggggtaacggcccaccaaagcgacgatcagtagccggcctgagagggcggacggccacattgggactgagacacggcccagactcctacgggaggcagcagtgggggatattgcacaatggagggaactctgatgcagcgacgccgcgtgggtgaagaagtatttcggtatgtaaagccctatcagcagggaagataatgacggtacctgact

SEQ ID NO: 7709 - DNA, 490 bp, unidentified
  misc_feature 1..490: note = Ascusbbf_721803, encodes 16S rRNA
  source 1..490: mol_type = genomic DNA
agagtttgatcctggctcaggatgaacgctggcggcgtgcctaacacatgcaagtcgaacggagcatagacgctgacgagagaagtagcttgctatagatcaaatcttgtttatgcttagtggcggacgggtgagtaacgtgtggataacctggtccatccagggggatagcagctggaaacggctgataataccgcataagcgcacattaccgcatggtagagtgtgaaaagaattatcgggatggaatggatccgcatctgattagccagttggcggggtagaagcccaccaaagcgacgatcagtagccggcctgagagggcggacggccacattgggactgagacacggcccagactcctacgggaggcagcagtgggggatattgcacaatggggggaaccctgatgcagcgacgccgcgtgggtgaagaagtatttcggtatgtaaagccctatcagcagggaagataatgacggtacctgagt

SEQ ID NO: 7710 - DNA, 490 bp, unidentified
  misc_feature 1..490: note = Ascusbbf_242631, encodes 16S rRNA
  source 1..490: mol_type = genomic DNA
agagtttgatcatggctcaggatgaacgctagcggcaggcctaacacatgcaagtcgaggggtagaaatagcttgctattttgagaccggcgcacgggtgcgtaacgcgtatggaatctaccttttactaagggatagcccgaagaaattcggattaataccttatggttttatagattggcatcaatttataaataaagatttatcggtaagagatgatcatgcgtcccattagctagttggtatggtaacggcataccaaggcaatgatgggtaggggtcctgagagggagatcccccacactggtactgagacacggaccagactcctacgggaggcagcagtgaggaatattggtcaatggacggaagtctgaaccagccatgccgcgtgcaggaagaatgtcctatggattgtaaactgcttttatacgggaagaaacgcttatttgcgaataggtttgacggtaccgtaagaataaggatcggc

SEQ ID NO: 7711 - DNA, 490 bp, unidentified
  misc_feature 1..490: note = Ascusbbf_407247, encodes 16S rRNA
  source 1..490: mol_type = genomic DNA
agagtttgatcatggctcaggatgaacgctagcggcaggcttaacacatgcaagtcgaggggcagcgggtctagcaatagatgccggcgaccggcgaaagggtgagtaacgcgtgagcaacgtgcccgtatgtgggggatagtcgatggaaacgtcgcgtaataccccgtaacacacggaaccgcatggttccatgttgaaagatttgattgcatacggatcggctcgcgtgccattaggtagacggcggggtaacggcccaccgtgccgacgatggctaggggttctgagaggaaggtcccccacattggaactgagacacggtccagactcctacgggaggcagcagtgaggaatattggacaatggccggaaggctgatccagccatgccgcgtgcgggaagaatgccctatgggttgtaaaccgcttttgcgggggagcaataagggtcacgtgtggcccgatgagagtaccctgcgaataagcat

SEQ ID NO: 7712 - DNA, 490 bp, unidentified
  misc_feature 1..490: note = Ascusbbf_1412488, encodes 16S rRNA
  source 1..490: mol_type = genomic DNA
agagtttgatcatggctcaggatgaacgctggcggcgtgcttaacacatgcaagtcgaacggagtttaagaaggaagcttgctttcattttaaacttagtggcggacgggtgagtaacgcgtgaggaacctgcccttgagtggggaacaacaactggaaacggttgctaataccgcataatgtcggagtaccgcatgatattccgaccaaaggatttattcgcttaaggatggcctcgcgtccgattaggcagttggtgaggtaacggcccaccaaacctacgatcggtagccgaactgagaggttgatcggccacattgggactgagacacggcccagactcctacgggaggcagcagtggggaatattgggcaatgggcgaaagcctgacccagcaacgccgcgtgaaggatgacggtcttcggattgtaaacttctttaattggggaagaacaaaatgacctacccaaataataagtcacggctaac

SEQ ID NO: 7713 - DNA, 490 bp, unidentified
  misc_feature 1..490: note = Ascusbbf_100105, encodes 16S rRNA
  source 1..490: mol_type = genomic DNA
agagtttgatcatggctcaggatgaacgctggcggcgtgcttaatacatgcaagtcgaacggagatgtccacctgatgaagcagagtgcttgcacaaagcagattctaccggatatcttagtggcggacgggtgagtaacgcgtgggtaacctgcctcatactggggaataacagccagaaatggctgctaataccgcataagcgcacagtaccgcatggtacagtgtgaaaagattttatcggtatgagatggacccgcgtctgattagctagttggcggggtaacggcccaccaaggctgcgatcagtagccgacttgagagagtgatcggccacattgggactgagacacggcccagactcctacgggaggcagcagtagggaatattgcacaatgggggaaaccctgatgcagcgacgccgcgtgagtgatgaagtatttcggtatgtaaagctctatcagcagggaagataatgacggtacctga

SEQ ID NO: 7714 - DNA, 490 bp, unidentified
  misc_feature 1..490: note = Ascusbbf_185315, encodes 16S rRNA
  source 1..490: mol_type = genomic DNA
agagtttgatcatggctcaggattaacgctggcggcatgcctaatacatgcaagtcgaacgagcagcgatgctagtggcgaacgggtgagtaacacgtagggaacctaccctttagacgaggataactactggaaacggtagctaaaactggatagtatattagaaggcatcttcggatatttaaaggtcctgtaagggaacactaaaggatggccctgcggaacattagctagttggcggggtaacggcccaccaaggcgacgatgtttagctgtgctgagaggcaaaacagccacactgggactgagacacggcccagactcctacgggaggcagcagtagggaattttcggcaatgggggaaaccctgaccgagcaatgccgcgtgaatgaagaaattcttcggaatgtaaaattctgttattagggacgaaaggtatataaaggaaatggtatataattgacggtacctaattagaaagccccggc

SEQ ID NO: 7715 - DNA, 490 bp, unidentified
  misc_feature 1..490: note = Ascusbbf_117566, encodes 16S rRNA
  source 1..490: mol_type = genomic DNA
agagtttgatcatggctcaggatgaacgctggcggcgtgcttaacacatgcaagtcgaacggagagcttttgacagaggattcgtccaatggataaagtttcttagtggcggacgggtgagtaacgcgtgaggaacctgccttggagtggggaataacacagagaaatttgtgctaataccgcataatgcattttagctgcatggctgagatgccaaagatttattgctctgagatggcctcgcgtctgattagatagttggcggggtaacggcccaccaagtcgacgatcagtagccggactgagaggttgaccggccacattgggactgagacacggcccagactcctacgggaggcagcagtggggaatattgggcaatgggcgcaagcctgacccagcaacgccgcgtgaaggaagaaggctttcgggttgtaaacttcttttatcagggacgataatgacggtacctgatgaataagccacggct

SEQ ID NO: 7716 - DNA, 490 bp, unidentified
  misc_feature 1..490: note = Ascusbbf_1739128, encodes 16S rRNA
  source 1..490: mol_type = genomic DNA
agagtttgatcatggctcaggacgaacgctggcggcatgcctaatacatgcaagtcgagcgaatgacgaagaagcttgcttcttctgatttagcggcggacgggtgagtaacacgtgggcaacctgccctgtagattgggataactccgggaaaccggggctaataccgaataatccatttcctcacatggggagatgttaaaagacggtttcggctgtcactacaggatgggcccgcggcgcattagctaattggtgaggtaacggctcaccaaggcgacgatgcgtagccgacctgagagggtgatcggccacactgggacttagacacggcccagactcctacgggaggcagcagtagggaatcttccacaatggacgaaagtctgatggagcaatgccgcgtgagtgaagaaggttttcggatcgtaaaactctgttgtgagggaagaacaagtatgagagtaactgctcgtaccttgacggtacc

SEQ ID NO: 7717 - DNA, 490 bp, unidentified
  misc_feature 1..490: note = Ascusbbf_280121, encodes 16S rRNA
  source 1..490: mol_type = genomic DNA
agagtttgatcatggctcaggatgaacgctggcggcgtgcttaacacatgcaagtcgaacggagataagcgctgatgaagcttcggcagaatcttgcttatcttagtggcggacgggtgagtaacgcgtgggtaacctacctgcaacagggggataacgattggaaacgatcgctaataccgcataacccgctagagtcgcatgactcagacggaaaagatttatcggttgcagatggacccgcgtctgattagctagttggtggggtaacggcctaccaaggcgacgatcagtagccgaactgagaggttgaccggccacattgggactgagacacggcccaaactcctacgggaggcagcagtggggaatattgcacaatgggggaaaccctgatgcagcgacgccgcgtgagtgatgaagtatttcggtatgtaaagctctatcagcagggaagaaaatgacggtacctgactaagaagccccggct

SEQ ID NO: 7718 - DNA, 490 bp, unidentified
  misc_feature 1..490: note = Ascusbbf_128904, encodes 16S rRNA
  source 1..490: mol_type = genomic DNA
agagtttgatcctggctcaggacgaacgctggcggcatgcctaacacatgcaagtcgaacggagatattgagagcttgcttttgatatcttagtggcggacgggtgagtaacgcgtgagcaacctgcctttcagtggggaataatacttcgaaagaggtactaataccgcataacgtattgagatcgcatggttttgataccaaagatttatcgctgagagatgggctcgcgtccgattagctggttggtggggtaacggctcaccaaggcgacgatcggtagccggactgagaggttgaacggccacattgggactgagacacggcccagactcctacgggaggcagcagtgggggatattgcgcaatgggggaaaccctgacgcagcaatgccgcgtgaaggacgaaggtcttcggattgtaaacttcttttgtcagggacgataatgacggtacctgacgaataagctccggctaactacgtgccag

SEQ ID NO: 7719 - DNA, 490 bp, unidentified
  misc_feature 1..490: note = Ascusbbf_19768, encodes 16S rRNA
  source 1..490: mol_type = genomic DNA
agagtttgatcatggctcaggatgaacgctggcggcgtgcttaacacatgcaagtcgaacggagatatcggcttcggctgatatctcagtggcggacgggtgagtaacgcgtgggtaacctgccttacaccgggggacaacagttggaaacgactgctaataccgcataagaccacggagccgcatggccctggggtaaaagatttatcgatgtaagatggacccgcgtctgattagccagttggcggggtaacggcccaccaaagctacgatcagtagccgacctgagagggtgatcggccacattgggactgagacacggcccaaactcctacgggaggcagcagtggggaatattgggcaatgggcgcaagcctgacccagcgacgccgcgtgagtgaagaagtatttcggtatgtaaagctctatcagcagggaagacaatgacggtacctgactaagaagcaccggctaaatacgtgccagcagc

SEQ ID NO: 7720 - DNA, 490 bp, unidentified
  misc_feature 1..490: note = Ascusbbf_43667, encodes 16S rRNA
  source 1..490: mol_type = genomic DNA
agagtttgatcctggctcaggatgaacgctggcggcgcgcctaacacatgcaagtcgaacggcgaagtcccttcggggacggaacagtggcggacgggtgagtaacgcgtgagtaacctgcccttacgagcggaatagcgtcgggaaactgacggtaataccgcatgaagcttgaccccggcatcggggagaagccaaagatttatcgcgtaaggatggactcgcgtcccattagatagttggcggggcaacggcccaccaagtcagcgatgggtagccggactgagaggttgaacggccacattggaactgagagacggtccagactcctacgggaggcagcagtggggaatattgggcaatgggcgaaagcctgacccagcgacgccgcgtgagcgaagaaggtcttcggattgtaaagctctgtgtacagggacgaagaatgacggtacctgtatagaaagccacggctaactacgtgccagcagcc

SEQ ID NO: 7721 - DNA, 490 bp, unidentified
  misc_feature 1..490: note = Ascusbbf_197879, encodes 16S rRNA
  source 1..490: mol_type = genomic DNA
agagtttgatcatggctcagaacgaacgctggcggcgcgtcttaagcatgcaagtcgagcgggattgtccagcttgctggacatgagagcggcggactggcgaggagcgcgtgggcgacgcgccccccggaccggaacagcccgtggaaacacggggtaatgccggatggcatgcctctcttggaggggaggcatcaaaggggcttcggccccgccgggggagcggcccgcgtcccatcagctagttggcggggaaaaggcccaccaaggctacgacgggtgtccggcctgagagggcgatcggacgcattgggactgagatacggcccagactcctacgggaggcagcagctaagaatattccgcaatgggcgaaagcctgacggagcgacgccgcgtggacgatggaggccggaaggttgtaaagtccttttgggagggaagaagaagccggggaggaaacgccccggcggcgacggtacctcgcgaa

SEQ ID NO: 7722 - DNA, 490 bp, unidentified
  misc_feature 1..490: note = Ascusbbf_96316, encodes 16S rRNA
  source 1..490: mol_type = genomic DNA
agagtttgatcatggctcaggacgaacgctggcggcgtgcttaacacatgcaagtcgagcggagacatgcgaacggaaggcttcggccggaaggttgcatgttttagcggcggacgggtgagtaacgcgtgaacaatctgtccttcacagggggataagacagcgaaagttgttctaataccgcatgggaccacgacagggcatcctgaaggggtgaaaggagcaatccggtgaagggtgagttcgcgtccgattagatagttggtgaggtaacggcccaccaagtcaacgatcggtagccgacctgagagggtgatcggccacattgggactgagacacggcccagactcctacgggaggcagcagtgggaatattgggcaatgggggaaaccctgacccagcaacgccgcgtggaggaagaaggttttcggattgtaaactcctgtcctcatcgaagaggaagagacggtaggtgaggaggaagcccc

SEQ ID NO: 7723 - DNA, 490 bp, unidentified
  misc_feature 1..490: note = Ascusbbf_166334, encodes 16S rRNA
  source 1..490: mol_type = genomic DNA
agagtttgatcatggctcaggatgaacgctagcggcaggcttaacacatgcaagtcgaggggcagcgcggaggtagcaatacttctggcggcgaccggcgcaagggtgcgtaacgcgtgagcaacatacccgtatcagggggataagcgatggaaacgtcgtctaataccgcataacaacgagagggacatccctcatgtttgaaagatacgtcggatacggattggctcgcgagacattagctagtcggcggggtaacggcccaccgaggcaacgatgtctaggggttctgagaggaaggtcccccacattggaactgagacacggtccaaactcctacgggaggcagcagtgaggaatattggacaatggccgaaaggctgatccagccatgccgcgtgaaggcagacggtcctatggattgtaaacttcttttgtacgggagcaataagggcgtcgtgacgtccgatgagagtaccgtacgaataag

SEQ ID NO: 7724 - DNA, 490 bp, unidentified
  misc_feature 1..490: note = Ascusbbf_599048, encodes 16S rRNA
  source 1..490: mol_type = genomic DNA
agagtttgatcatggctcaggatgaacgctggcggcgtgcctaatacatgcaagtcgaacggagtatcttcggatacttagtggcgaacgggtgagtaatacttgaacaacctgcccctttgactgggataaccgtctgaaaagacagctaataccggataggtaatattgaggcatctcgatattattaaagatgggttacatcacattgggatgggttcaagtcgcattagctagttggtgaggtaacggcccaccaaggccacgatgcgtagccgatctgagaggatgaacggccacattgggactgagacacggcccagactcctacgggaggcagcagtagggaattttcggcaatgggcgaaagcctgaccgagcaacgccgcgtgaacgatgaaggtctttggattgtaaagttctgttacgagggaagaacatctggtatagggaatgatatcagactgacggtacctcgccagaaagccac

SEQ ID NO: 7725 - DNA, 490 bp, unidentified
  misc_feature 1..490: note = Ascusbbf_407434, encodes 16S rRNA
  source 1..490: mol_type = genomic DNA
agagtttgatcatggctcaggatgaacgctggcggcgtgcctaatacatgcaagtcgaacggagcacttcggtgcttagtggcgaacgggtgagtaacacataaacaatctacccttaagtctgggataacggttggaaacgaccgctaataccggataggtaaaaccgaggcatcttggatttattaaagctgggctacagcgctaaaggatgagtttatgtcgcattagctagttggcggggtaacggcccaccaaggcgatgatgcgtagccggtctgagaggatgaacggccacattgggactgagacacggcccagactcctacgggaggcagcagtagggaattttcggcaatgggcgaaagcctgaccgagcaacgccgcgtgaacgatgaaggtctttggattgtaaagttctgttacgagggaagaatggcttatatagggaatgatataagcagagacggtacctcgccagaaagccacg

SEQ ID NO: 7726 - DNA, 490 bp, unidentified
  misc_feature 1..490: note = Ascusbbf_620834, encodes 16S rRNA
  source 1..490: mol_type = genomic DNA
agagtttgatcatggctcaggatgaacgctagcggcaggcctaacacatgcaagtcgaggggcatcgcgggtgtgagcaatcactcccggcggcgaccggcggatgggtgagtaacgcgtatccaacctgccccatgcccgggcacagcccctggaaacggggagtgactcccgatggcgcgctttggccgcatggctgttgcgctaaatttcgaggcatgggatgggggtgcgtccgattaggtagttggcggggcaacggcccaccaagcctacgatcggtaggggttctgagaggaaggtcccccacattgggactgagacacggcccaaactcctacgggaggcagcagtgaggaatattggtcaatgggcggaagcctgaaccagccaagtagcgtggaggatgacggccctacgggttgtaaactcctttagcgcggggataacacgccgcacgtgtggggcgctgcaggtaccgcgagaataa

SEQ ID NO: 7727 - DNA, 490 bp, unidentified
  misc_feature 1..490: note = Ascusbbf_44038, encodes 16S rRNA
  source 1..490: mol_type = genomic DNA
agagtttgatcatggctcaggacgaacgctggcggcgtgcttcatacatgcaagtcgaacgataaggcgccttcgggcgtacataagtggcggacgggtgagtaaaatgtagagaatctgccctagagcgggggacaacggttggaaacgaccgctaataccccatatgagcgtagttgagatactattcttgaaaactccggtgctctgggatgagtctgcatctgattagctagttgggggtgtaatggaccaccaaggcgatgatcagtagctggtttgagaggatgatcagccacaatgggactgagacacggcccatactcctacgggaggcagcagtagggaattttgcgcaatgggggaaaccctgacgcagcaacgccgcgtgaccgatgaagcccttcggggtgtaaaggtctgtcagtggggacgaaaaatgacggtacccacagaggaagcaccggctaactccgtgccagcagccgcg

SEQ ID NO: 7728 - DNA, 490 bp, unidentified
  misc_feature 1..490: note = Ascusbbf_1891142, encodes 16S rRNA
  source 1..490: mol_type = genomic DNA
agagtttgatcctggctcaggatgaacgctggcggcgtgcctaacacatgcaagtcgaacggagttatgagagagatttcctcggattgacatcttataacttagtggcggacgggtgagtaacgcgtggataacctgccttgcacagggggatagcagttggaaacgactgataataccgcataagaccacagtaccgcatggcacagtggtaaaagatttatcggtgcaagatggatccgcgtctgattagccagttggcggggtaacggcccaccaaagcgacgatcagtagccggcctgagagggcggacggccacattgggactgagacacggcccagactcctacgggaggcagcagtgggggatattgcacaatgggcgcaagcctgatgcagcgacgccgcgtgagtgaagaagtatttcggtatgtaaagctctatcagcagggaagaaaggcccttcggggagatgacggtacctgacta

SEQ ID NO: 7729 - DNA, 490 bp, unidentified
  misc_feature 1..490: note = Ascusbbf_57404, encodes 16S rRNA
  source 1..490: mol_type = genomic DNA
agagtttgatcctggctcaggatgaacgctagctacaggcttaacacatgcaagtcgaggggcagcatgcggattgcttgcaatccgcgatggcgaccggcgcacgggtgagtaacgcgtatccaaccttccctacacttcggcataacccggcgaaagtcggactaattccgaatggtctcctttgacggcatcagaagcggagtaaagatttatcggtgtaggatggggatgcgtccgattagctggttggtgtggtaacggctcaccaaggctacgatcggtaggggttctgagaggaaggtcccccacactggaactgagacacggtccagactcctacgggaggcagcagtgaggaatattggtcaatgggcggaagcctgaaccagccaagtagcgtgcaggatgacggccctatgggttgtaaactgcttttatgcgggaataatgtcggacacgcgtgtctgcttgcatgtaccgcatgaat

SEQ ID NO: 7730 - DNA, 472 bp, unidentified
  misc_feature 1..472: note = Ascusbbf_1894953, encodes 16S rRNA
  source 1..472: mol_type = genomic DNA
agagtttgatcatggctcagagcgaacgctggcggcaggcttaacacatgcaagtcgagcgggcgtagcaatacgtcagcggcagacgggtgagtaacacgtgggaacgtgccctttggttcggaacaacacagggaaacttgtgctaataccggataagcccttacggggaaagatttatcgccaaaggatcggcccgcgtctgattagcttgttggtgaggtaatggctcaccaaggctacgatcagtagctggtctgagaggatgatcagccacactgggactgaggcacggcccagactcctacgggaggcagcagtggggaatattggacaatgggcgcaagcctgatccagccatgccgcgtgagtgatgaaggccctagggttgtaaagctctttcggcggggaagataatgacggtacccgcataagaagccccggctaacttcgtgccagcagccgcggtaat

SEQ ID NO: 7731 - DNA, 490 bp, unidentified
  misc_feature 1..490: note = Ascusbbf_1341149, encodes 16S rRNA
  source 1..490: mol_type = genomic DNA
agagtttgatcatggctcaggatgaacgctggcggcgtgcctaatacatgcaagtcgaacgagggtgcttgcaccctagtggcgaacgggtgagtaacacgtaggtaacctgcccttaagcttgggatacccagaggaaactttggctaataccggataacaacagaggaggcatctcttcagtttgaaaggccctttacggggtcacttaaggatgaacctgcggcgcattagctagttggtgagataacagcccaccaaggcgaggatgcgtagccgacctgagagggtgatcggccaaagtgcaactgagacacggtccaaactcatacgggaggcagaagtaaggagttttcggcaaggggggaaaccctgaccgagaaacgccgcgtgagtgatgacggccctatgggttgtaaagctctgttgtaagggacgaatgactaggttaggaaatgaacttagtttgacggtaccttaccagaaagca

SEQ ID NO: 7732 - DNA, 490 bp, unidentified
  misc_feature 1..490: note = Ascusbbf_2139, encodes 16S rRNA
  source 1..490: mol_type = genomic DNA
agagtttgatcatggctcaggatgaacgctagctacaggcttaacacatgcaagtcgagcggaactgcttcggcagtttagcggcagacgggtgagtaacacgtatccaacctttcccttactcgggcatagcctctggaaacggagagtaattcccgatgtgatgtacagttcgcatgttttgcacatcaaagattcatcggtaaggggtggggatgcgttccattaggtagtaggcggggtaacggcccacctagccgatgatggataggggttctgagaggaaggtcccccacattggaactgcgacacggtccaaactcctacgggaggcagcagtgaggaatattggtcaatggacgcaagtctgaaccagccaagtagcgtgcaggatgacggccctatgggttgtaaactgcttttctgcgggaataacgttgagctcgtgagctcaagtgcatgtaccgcaggaataaggatcggctaactc

SEQ ID NO: 7733 - DNA, 490 bp, unidentified
  misc_feature 1..490: note = Ascusbbf_79774, encodes 16S rRNA
  source 1..490: mol_type = genomic DNA
agagtttgatcctggctcaggattaacgctggcggcgtgcataacacattcaagtcgaacggacgaagcccttcggggcctagttagtggcggacgggtgagtaacgcgtgagcaacctgcccttatgtgggggataacgaccggaaacggtcgctaataccgcatgacccgatagtaccgcatggtacagtcggcaaagatttattgcataaggatgggctcgcgtctgattaggcagttggtgaggcaacggctcaccaaaccgacgatcagtagccggactgagaggttgaacggccacattggaactgagatacggtccagactcctacgggaggcagcagtggggaatattgggcaatggacgaaagtctgacccagcgacgccgcgtgagggaagaaggtcttcggattgtaaaccttaaacaacagggacgaagcagtgacggtacctgttaggaagccacggctaactacgtgccagcagcc

SEQ ID NO: 7734 - DNA, 490 bp, unidentified
  misc_feature 1..490: note = Ascusbbf_299304, encodes 16S rRNA
  source 1..490: mol_type = genomic DNA
agagtttgatcctggctcagaatgaacgctggcggcatggattaggcatgcaagtcgaacggggcgcagcgatgcgcccagtggcgaaagggtgagtagcacgtgaagaacctgcccccggatccggaacaagcgctggaaacggcgtctgatacgggatgtggacgccccccgcatggggggcgctctaaagattcatcgtccggggagggcttcgcgtcccattagctggttggcggggtaacggcccaccaaggctgcgacgggtaggtggtctgagaggatggtcacccacactgggactgagacactgcccagactcctacgggaggctgcagtcgagaatcttccgcaatgggggcaaccctgacggagcgatgccgcgtgagggaagtaggccttcgggtcgtgaacctctgtcacccgggacgaaggaagtgacggtaccgggggaggaagccatggctaactacgtgccagcagccgcggt

SEQ ID NO: 7735 - DNA, 490 bp, unidentified
  misc_feature 1..490: note = Ascusbbf_332738, encodes 16S rRNA
  source 1..490: mol_type = genomic DNA
agagtttgatcatggctcaggatgaacgctagcggcaggcttaacacatgcaagtcgaggggcagcgagatgtagtaatacattgtcggcgaccggcgcacgggtgcgtaacgcgtatgcaacctaccatatacaggggaataacctttcgaaagggagactaataccccatagtattacaataaggcatcttattttaattaaagatttattggtatatgatgggcatgcgtgccattagctagttggagaggtaacggctcaccaaggctacgatggctaggggttctgagaggaagatcccccacactggtactgagacacggaccagactcctacgggaggcagcagtgaggaatattggtcaatgggcggaagcctgaaccagccatgccgcgtgcaggaagacggccctacgggttgtaaactgcttttatgtgaggataaacctagatttgcgaatctagctgaaggtatcacatgaataagg

SEQ ID NO: 7736 - DNA, 490 bp, unidentified
  misc_feature 1..490: note = Ascusbbf_211819, encodes 16S rRNA
  source 1..490: mol_type = genomic DNA
agagtttgatcctggctcaggacgaacgctggcggtatgcttaacacatgcaagtcgaacgagaagctttttaatgatccttcgggtgaactaagaagtggaaagtggcgaacgggtgagtaacgcgtgggtaacctgcctcatggaaaggaatagcctcgggaaactgggagtaaagccttatattattgagttgtcgcatggcaattcgatgaaaactccggtgccatgagatggacccgcgtcccattagctagttggtgagataacagcccaccaaggcaacgatgggtaaccggtctgagagggcgaacggtcacactggaactgagacacggtccagactcctacgggaggcagcagtggggaatattgcgcaatgggggaaaccctgacgcagcaataccgcgtgagtgaagaaggttttcggatcgtaaaactcttttattggggaagaagaagtgacggtacccaatgaagaagtcccggc

SEQ ID NO: 7737 - DNA, 490 bp, unidentified
  misc_feature 1..490: note = Ascusbbf_39039, encodes 16S rRNA
  source 1..490: mol_type = genomic DNA
agagtttgatcatggctcagaacgaacgctggcggcgcgttttaagcatgcaagtcgagcggtaagccggagcaatccggcctagagcggcggacgggtgagtaacacgtggataatctggcctacagtttgggatagcctggtgaaagccaggataataccggatacgacggtttggtcacaagaccgaatcgggaaaggggctaaggcctcgctgaaggatgagtccgcgtcccattagctagatggtgaggtaaaggcccaccatggcgatgatgggtagccggcctaagagggtgaacggccacattgggactgagatacggcccagactcctacgggaggcagcagctaagaatcttccgcaatggtcgaaagactgacggagcgacgccgcgtgaatgatgaaggccgtgaggttgtaaagttcttttctggagggagaataagtgatgtagggaatgacatcatgatgacgtgaatccaggaa

SEQ ID NO: 7738 - DNA, 490 bp, unidentified
  misc_feature 1..490: note = Ascusbbf_6606, encodes 16S rRNA
  source 1..490: mol_type = genomic DNA
agagtttgatcatggctcaggataaacgctggcggcgtgcattatgcatgcaagtcgaacgggactcgcaagagtctagtggcaaacgggtgagtaacacataggtaacctgtccacgagtggggaataactcgccgaaaggcggactaataccgcatacgatggcttctcacaagagaggtcatgaaagcagcaatgcgctggtggaggggcctgtgaccgattagtttgttggtggggtaacggcctaccaagactgtgaccggtagctggtctgagaggatggtcagccacattgggactgagacacggcccaaactcctacgggaggcagcagcaaggaattttgcgcaatgggcgaaagcctgacgcagcaacgccgcgtgaaggatgaaggccttcgggttgtaaacttcttttataagggaagaatgatgacggtaccttatgaataagcttcggctaactacgtgccagcagccgcggtaat

SEQ ID NO: 7739 - DNA, 490 bp, unidentified
  misc_feature 1..490: note = Ascusbbf_79618, encodes 16S rRNA
  source 1..490: mol_type = genomic DNA
agagtttgatcatggctcaggacgaacgctggcggcgtgcttaacacatgcaagtcgaacgagaatgcaggagagcttgcttgaatgtattcgagtggcggacgggtgagtaacgcgtgaataatctgtcccatacagggggataacgcatcgaaagatgtgctaataccgcgtaggaccacgaggtcgcatggccttggggtgaaaggagcaatccagtatggggtgagttcgcgtctgattagatagttggtgaggtaacggctcaccaagtcaacgatcagtagccgacctgagagggtgatcggccacattgggactgagacacggcccagactcctacgggaggcagcagtggggaatattgggcaatgggcgaaagcctgacccagcaacgccgcgtgaaggaagaaggttttcggattgtaaacttctgtcctatgtgaagagatagagacggtagcataggaggaagccccggctaactacg

SEQ ID NO: 7740 - DNA, 490 bp, unidentified
  misc_feature 1..490: note = Ascusbbf_31747, encodes 16S rRNA
  source 1..490: mol_type = genomic DNA
agagtttgatcatggctcagattgaacgctggcggcaggcctaacacatgcaagtcgagcgcgaaagttcttcggaatgagtaaagcggcgaacgggtgagtaacgcgtgggaatctgcccagtagtgggggataacgttccgaaaggaacgctaataccgcatacgccctacgggggaaagggggggatcttcggacctctcgctattggatgagcctgcgtcggattagctagttggtggggtaagggcctaccaaggcgacgatccgtaactggtctgagaggatgatcagtcacactggaactgagacacggtccagactcctacgggaggcagcagtggggaatattggacaatgggggcaaccctgatccagccatgccgcgtgtgtgaagaaggccttagggttgtaaagcactttcagtggggagaaaggtggctcacctaatacgtgagttaattgatgttacccacagaagaagcaccgg

SEQ ID NO: 7741 - DNA, 490 bp, unidentified
  misc_feature 1..490: note = Ascusbbf_91272, encodes 16S rRNA
  source 1..490: mol_type = genomic DNA
agagtttgatcctggctcaggataaacgctggcggcgtgcttaacacatgcaagtcgaacggagtggttctcccgagaagtgatgaagcttgcttcagaatgactcatttgaatcacttagtggcggacgggtgagtaacgcgtgggtaacctgccctatactgggggatagcagttggaaacgactgataataccgcataagcacacagcatcgcatgttgcagtgtgaaaaactccggtggtataggatggacccgcgtctgattagctagttggtgaggtaacggcccaccaaggcgacgatcagtagccggcctgagagggtgtacggccacattgggactgagacacggcccaaactcctacgggaggcagcagtggggaatattggacaatgggggcaaccctgatccagcgacgccgcgtgagcgaagaagtatttcggtatgtaaagctctatcagcagggaagataatgacggtacctgac

SEQ ID NO: 7742 - DNA, 490 bp, unidentified
  misc_feature 1..490: note = Ascusbbf_195251, encodes 16S rRNA
  source 1..490: mol_type = genomic DNA
agagtttgatcatggctcaggatgaacgctagcggcaggcttaacacatgcaagtcgaggggcagcgggtctagcaatagatgccggcgaccggcgaaagggtgagtaacgcgtgagcaacatgcccggagcagggggataggcactggaaacggtgtgtaatatcccgtaacatattccatcgcatggtgggatattgaaagattaatcggctccggattggctcgcgtaccattaggtagttggcggggtaacggcccaccaagccgacgatggttaggggttctgagaggaaggtcccccacattggaactgagacacggtccagactcctacgggaggcagcagtgaggaatattggacaatggccgggaggctgatccagccatgccgcgtgagggaggacggccctatgggttgtaaacctcttttgtcggggagcaataagtattacgtgtaatacgatgagagtacctggcgaataagcatc

SEQ ID NO: 7743 - DNA, 490 bp, unidentified
  misc_feature 1..490: note = Ascusbbf_82374, encodes 16S rRNA
  source 1..490: mol_type = genomic DNA
agagtttgatcatggctcaggatgaacgctggcggcgcgcataacacatgcaagtcgaacggagtcacgttgaaacctagtgatatgtgacttagtggcggacgggtgagtaacgcgtgggtaacctacctgatattgggggacaacagttagaaatgactgctaataccgcatacgacattcggagggcatcctctgaatgggaaaggaattatccgataccagatggacccgcgtctgattagctagttggtgaggtaacggcccaccaaggcgacgatcagtagccgaactgagaggttgaccggccacattgggactgagacacggcccaaactcctacgggaggcagcagtggggaatattgcacaatggggggaaccctgatgcagcgacgccgcgtgagtgatgaagtatttcggtatgtaaagctctatcgatggggaagaaaatgacggtacccaagtaagaagccccggctaactacgtg

SEQ ID NO: 7744 - DNA, 490 bp, unidentified
  misc_feature 1..490: note = Ascusbbf_638681, encodes 16S rRNA
  source 1..490: mol_type = genomic DNA
agagtttgatcatggctcaggattaacgctagcggtatgcctaatatatgcaagtcgagcgggagcagcaatgctctagcggcaaacgggtgagtaatacgtatctaatctaccctttagaagggacaacagatcgaaagatttgctaataccttataggacatagattcacatgaaactatgtttaaagttccgttcggaacgctttaggatgagggtgcggcttatcagatagttggtgaggtaatggcccaccaagtcaatgacgagtagctatgctgagaggtaaaatagccacaaggggactgagacacggcccctactcctacgggaggcagcagtagggaatttttcacaatgggcgaaagcctgatggagcaataccgcgtgaatgatgaaggtcttcggattgtaaaattcttttataagggacgaatgatgtgaacaggaaatggttcgcaagtgactgtaccttttgaataagtaacgg

SEQ ID NO: 7745 - DNA, 490 bp, unidentified
  misc_feature 1..490: note = Ascusbbf_230145, encodes 16S rRNA
  source 1..490: mol_type = genomic DNA
agagtttgatcctggctcaggatgaacgctggcggcgtgcttaacacatgcaagtcgaacggaggaccctggaaggagttttcggacaacagaaggggtaccttagtggcggacgggtgagtaacgcgtgaggaacctgccttggagaggggaataacacagagaaatttgtgctaataccgcatgaagcagctgggtcgcatggccctggctgccaaagatttatcgctctgagatggcctcgcgtctgattagcttgttggcggggtaacggcccaccaaggcgacgatcagtagccggactgagaggttggccggccacattgggactgagacacggcccagactcctacgggaggcagcagtggggaatattgggcaatgggcgcaagcctgacccagcaacgccgcgtgaaggaagaaggctttcgggttgtaaacttcttttatgcaggacgaagtaagtgacggtactgcatgaataagctcc

SEQ ID NO: 7746 - DNA, 490 bp, unidentified
  misc_feature 1..490: note = Ascusbbf_408315, encodes 16S rRNA
  source 1..490: mol_type = genomic DNA
agagtttgatcctggctcaggatgaacgctagctacaggcttaacacatgcaagtcgcggggcagcatggggtttgcttgcaaaccccgatggcgaccggcgcacgggtgagtaacgcgtatccaacctgccccatagcagggaatagcccggcgaaagtcggattaatgccctatgttgtccgaggcggacatctaactcggaccaaaggtacgccgctatgggatggggatgcgtaggattaggcaggcggcggggcgacggcccaccgcgccgacgatccttaggggttctgagaggaaggtcccccacactggtactgagacacggaccagactcctacgggaggcagcagtgaggaatattggtcaatgggcgagagcctgaaccagccaagtagcgtgcaggatgacggccctacgggttgtaaactgcttttacgcggggataaagcgcgggacgtgtcccgccttgcaggtaccgcgtgaat

SEQ ID NO: 7747 - DNA, 490 bp, unidentified
  misc_feature 1..490: note = Ascusbbf_1887856, encodes 16S rRNA
  source 1..490: mol_type = genomic DNA
agagtttgatcatggctcaggatgaacgctggcggcgcgtcttaagcatgcaagtcgagcgggaaccgggggcttgcccccggcgagagcggcggactggcgaggagcgcgtgggcgacgcgccccccggactggaacagcccgtggaaacacggggtaatgccggatggcatgcctttcttggaggggaggcatcaaaggggcttcggccccgccgggggagcggcccgcgtcccatcagcttgttggcggggaaaaggcccaccaaggctacgacgggtgtccggcctgagagggcgatcggacgcattgggactgagatacggcccagactcctacgggaggcagcagctaagaatattccgcaatgggcgaaagcctgacggagcgacgccgcgtgcgcgatggaggccggaaggttgtaaagcgcttttgggagggaggaagaagccggggaggaaacgccccggcggcgacggtacctcgcgaa

SEQ ID NO: 7748 - DNA, 490 bp, unidentified
  misc_feature 1..490: note = Ascusbbf_1563185, encodes 16S rRNA
  source 1..490: mol_type = genomic DNA
agagtttgatcatggctcaggatgaacgctggcggcgtgcttaacacatgcaagtcgagcgaagcacttcacccgaagaagagaaccagcttgctggtgatcggactcaatcgaagtgactgagcggcggacgggtgagtaacgcgtggagaacctgcctttatccgggggataacagttagaaatgactgctaataccgcataagcgcacaccaaggcatcttggagtgtaaaaaactccggtggatagagatggctccgcgttggattagccagttggcggggtaacggcccaccaaagcgacgatccatagccggcctgagagggcgaccggccacattgggactgagacacggcccaaactcctacgggaggcagcagtggggaatattgcacaatgggggaaaccctgatgcagcgacgccgcgtgaacgaagaagtatttcggtatgtaaagttctatcagcagggaagaaaatgacggtacct

SEQ ID NO: 7749 - DNA, 490 bp, unidentified
  misc_feature 1..490: note = Ascusbbf_128213, encodes 16S rRNA
  source 1..490: mol_type = genomic DNA
agagtttgatcctggctcaggatgaacgctagctacaggcttaacacatgcaagtcgaggggcagcatgaacttagcttgctaagtttgatggcgaccggcgcacgggtgagtaacgcgtatccaacctacccttcagtaggggacagcccggcgaaagtcggattaataccctatgttatccgttgaggacatctgatgtggatgaaagatttatcgctgagggatggggatgcgtctgattaggtggatggcggggtaacggcccaccatgccttcgatcagtaggggttctgagaggaaggtcccccacattggaactgagacacggtccaaactcctacgggaggcagcagtgaggaatattggtcaatgggcgtgagcctgaaccagccaagtagcgtgagggatgacggccctacgggttgtaaacctcttttgcgggggaataacaggcttcacgagttggagttttgcatgtaccccgagaa

SEQ ID NO: 7750 - DNA, 490 bp, unidentified
  misc_feature 1..490: note = Ascusbbf_44201, encodes 16S rRNA
  source 1..490: mol_type = genomic DNA
agagtttgatcatggctcaggataaacgctggcggcgcacataagacatgcaagtcgaacgaactcaacctattcttttagattaggagcggttagtggcggactggtgagtaatgtataagtaacctgcctattagaggggaacaacagttggaaacgactgctaataccgcatatgccatagagatcacatgatttcagtgggaaaggagcaatccgctaatagatggacttatatctgattagctagttggtgtggtaacggcataccaaggcgacgatcagtagccggactgagaggttaaacggccacattgggactgagatacggcccagactcctacgggaggcagcagtcgggaatattgcgcaatggaggaaactctgacgcagtgacgccgcgtgcaggaagaaggctttcgagttgtaaactgctttagacagggaagaagaagtgacagtacctgtagaataagctccggctaactac

SEQ ID NO: 7751 - DNA, 490 bp, unidentified
  misc_feature 1..490: note = Ascusbbf_37750, encodes 16S rRNA
  source 1..490: mol_type = genomic DNA
agagtttgatcctggctcaggacgaacgctggcggcgtgcttcaaacatgcaagtcgaacgagagacgagggagcttgctcctgaggatctagtggcggacgggtgagtaacgcgtgaacaatctggcttacacagggggataacacttagaaatgagtgctaataccgcatatgaccacggcctggcatcgggcaggggtgaaaggagagatccggtgaaagatgagtttgcgtttcattagctagttggtgaaggtaacggcccaccaaggcgacgatgaatagccgatctgagaggatgaacggccacactggaattgagagacggtccagactcctacgggaggcagcagttaggaatattgggcaatggagggaactctgacccagcaacgccgcgtgaaggaagaaggttttcggattgtaaacttctgatctgtgggaagaagaagatgacggtaccacaggagaaagccacggctaactacg

SEQ ID NO: 7752 - DNA, 490 bp, unidentified
  misc_feature 1..490: note = Ascusbbf_175656, encodes 16S rRNA
  source 1..490: mol_type = genomic DNA
agagtttgatcctggctcaggatgaacgctggcggcgtgcctaacacatgcaagtcgaacgaggttatcttacttggagattcgtcgaagagttttttaaccgagtggcggatgggtgagtaacgcgtggagaacctgcccttatcagggggataacaactggaaacggttgacaataccgcatacgctcgtaggttcgcatgaacttacgaggaaagatttatcggataaggatggctccgcgtcggattagccagttggcggggtaacggcccaccaaagcgacgatccgtagccggcctgagagggcgaccggccacattgggactgagacacggcccagactcctacgggaggcagcagtgggggatattgcacaatggggggaaccctgatgcagcgacgccgcgtggaggaagaagtatttcggtatgtaaactcctatcagcagggaagaaaatgacggtacctgactaagaagccccggcta

SEQ ID NO: 7753 - DNA, 490 bp, unidentified
  misc_feature 1..490: note = Ascusbbf_165931, encodes 16S rRNA
  source 1..490: mol_type = genomic DNA
agagtttgatcctggctcaggacgaacgctggcggcgtgcttaaaacatgcaagtcgaacggagttgtttgttagcactaaggtatttcagataagatactttagtgctaataaatagcttagtggcggacgggtgagtaacacatgagcaacctgcctttcacagggggataacacttagaaataggtgctaataccgcataagaccacgacagggcatcctgatggggtcaaaggagcaatccggtggaagaggggcttgtgactcattagttagttggtagggtaacggcctaccaagaccgcgatgagtagccgatctgagaggatgaacggccacattggaactgagatacggtccagactcctacgggaggcagcagttaggaatattgggcaatgggcgaaagcctgacccagcaacgccgcgtgaaggaagaaggttttcggattgtaaacttctgatctaagggaaaaagagagtgatggt

SEQ ID NO: 7754 - DNA, 490 bp, unidentified
  misc_feature 1..490: note = Ascusbbf_158086, encodes 16S rRNA
  source 1..490: mol_type = genomic DNA
agagtttgatcatggctcaggattaacgctggcggcgtgcataacacattcaagtcgaacggagtattgctttcgggtgatactcagtggcggacgggtgagtaacgcgtgagcaatctgccccttattgcgggataacagagagaaatttctgctaatacggcataacgcatcggtatcgcatggtacgggtgccaaagatttatcgatgagggatgagctcgcgtccgattagatagttggtgacggtaacggcgcaccaagtctgcgatcggtagccggactgagaggttgaacggccacattgggactgagacacggcccagactcctacgggaggcagcagtggggaatattggacaatgggggaaaccctgatccagcgacgccgcgtgaaggaagaaggccttcgggttgtaaacttcagtcagcagggaagaacaaatgacggtacctgcaggggaagccacggctaactacgtgccagcag

SEQ ID NO: 7755 - DNA, 490 bp, unidentified
  misc_feature 1..490: note = Ascusbbf_87363, encodes 16S rRNA
  source 1..490: mol_type = genomic DNA
agagtttgatcatggctcaggatgaacgctggcggcgtgcctaatacatgcaagtcgaacgaagtacttcggtacttagtggcgaacgggtgagtaacgcgtgaacaacctacccctttgactgggataccgtcttgaaaaggacgttaataccggataggtaaccttgaggcatctcaaagttattaaaggtgggctacaccacattgggatgggttcacgttgcattagctagttggtgaggtaacggcccaccaaggcgatgatgcatagccggtctgagaggatgaacggccacattgggactgagacacggcccagactcctacgggaggcagcagtagggaattttcggcaatgggcgaaagcctgaccgagcaacgccgcgtgaacgatgaaggtctttggattgtaaagttctgttacgagggaagaagaatcagcatagggaatgatgctgaagtgacggtacctcgccagaaagccacgg

SEQ ID NO: 7756 - DNA, 490 bp, unidentified
  misc_feature 1..490: note = Ascusbbf_161783, encodes 16S rRNA
  source 1..490: mol_type = genomic DNA
agagtttgatcatggctcaggatgaacgctggcggcgtgcctaatacatgcaagtcgaacggagcacttcggtgcttagtggcgaacgggtgagtaacacataaacaatctaccctgaagactgggataacggttggaaacgaccgctaataccggataggtaactctgaggcatcttagagttattaaagttgggttacaacactgcaggatgagtttatgtcgcattagctggttggcggggtaacggcccaccaaggcgatgatgcgtagccggtctgagaggatgaacggccacattgggactgagacacggcccagactcctacgggaggcagcagtagggaattttcggcaatgggcgaaagcctgaccgagcaacgccgcgtgaacgatgaaggtctttggattgtaaagttctgttacgagggaagaatggctggtatagggaatgatatcagcagagacggtacctcgccagaaagccacg

SEQ ID NO: 7757 - DNA, 490 bp, unidentified
  misc_feature 1..490: note = Ascusbbf_862493, encodes 16S rRNA
  source 1..490: mol_type = genomic DNA
agagtttgatcctggctcaagacgaacgctggcggcgtgcctaacacatgcaagtcgagcggggattacttagtggagagcttcggcaggaagctgagtaattctagcggcggacgggtgagtaacgcgtgaacaatctgtcccggacagggggataacacttggaaacaggtgctaataccgcatgagaccacaacgtcacatggcgaaggggtcaaaggagaaatccggtccggggtgagttcgcgtctgattagctagttggcggggtaatggcccaccaaggcgacgatcagtagccgacctgagagggtgatcggccacattggaactgagacacggtccaaactcctacgggaggcagcagtggggaatattgggcaatgggcgaaagcctgacccagcaacgccgcgtgagggaagaaggttttcggattgtaaacctctgtccttggtgacgaaggaagtgacggtagccaaggaggaagcc

SEQ ID NO: 7758 - DNA, 490 bp, unidentified
  misc_feature 1..490: note = Ascusbbf_965116, encodes 16S rRNA
  source 1..490: mol_type = genomic DNA
agagtttgatcctggctcagaacgaacgctggcggcatgcctaacacatgcaagtcggacgtgagtgtccttcgggacacttaagtggcgcacgggtgagtaatgcataggaacatacctctgggtggggaataacgtcgggaaaccggcgctaataccgcatgacctcgaaacaggaaaggtggcctctatttataagctaccgccgagagagtggcctatgtcccattagctagttggcggggtaatagcccaccaaggctacgatgggtagctggtctgagaggatgatcagccacactggaactgagatacggtccagactcctacgggaggcagcagtggggaatattgcacaatgggcgaaagcctgatgcagcaatgccgcgtgagtgaagaaggccttagggttgtaaagctctttcgactgggaagaagtgttttatggctaatatccatagaatgtgacggtaccagcagaagaagcacc

SEQ ID NO: 7759 - DNA, 490 bp, unidentified
  misc_feature 1..490: note = Ascusbbf_767413, encodes 16S rRNA
  source 1..490: mol_type = genomic DNA
agagtttgatcctggctcaggatgaacgctagcggcaggcctaacacatgcaagtcgaggggcagcgcggtgcagcaatgcactggcggcgaccggcgcacgggtgcgtaacgcgtatgcaacccacccgcaacaggggtataacggagggaaacttccactaatcccccatatagccgtcatcccgcatggggaggcggcgaaagcttcggcggttgcggacaggcatgcgtgacattacctagttggcggggcaacggcccaccaaggctgcgatgtctaggggagctgagaggctaatcccccacactggtactgagacacggaccagactcctacgggaggcagcagtgaggaatattggtcaatggtcggaagactgaaccagccatgccgcgtggaggaagaaggccctatgggttgtaaacttcttttagccgggagtaataaggggggtgcgccccccgatgagagtaccggcggaataagc

SEQ ID NO: 7760 - DNA, 490 bp, unidentified
  misc_feature 1..490: note = Ascusbbf_9135, encodes 16S rRNA
  source 1..490: mol_type = genomic DNA
agagtttgatcctggctcaggataaacgctggcggcgcacataagacatgcaagtcgaacggaagtcgtaattaaagaagaacaaagatttatcagagtgaatttttaactacaatggctttagtggcggactggtgagtaatgtataagtaacctgcctatcagaggggaacaacagttggaaacgactgctaataccgcatatgccataatggagacatcttcaaagtgggaaaggagcaatccgctgatagatgggcttatatctgattagctagttggtggggtaacggcctaccaaggcgacgatcagtagccgaactgagaggttagacggccacattgggactgagatacggcccagactcctacgggaggcagcagtcgggaatattgcgcaatggaggaaactctgacgcagtgacgccgcgtgcaggaagaaggttttcggattgtaaactgctttagacaggaaagaaaaaagacagta

SEQ ID NO: 7761 - DNA, 490 bp, unidentified
  misc_feature 1..490: note = Ascusbbf_5270, encodes 16S rRNA
  source 1..490: mol_type = genomic DNA
agagtttgatcatggctcaggacgaacgctggcggcgtgcttaacacatgcaagtcgaacgaggcttagggaagagcttgctcggaactaagccgagtggcggacgggtgagtaacgcgtgagcaacctgtctcacacaggggaataacgcatcgaaagatgtgctaataccgcgtaggaccacgaaggggcatccctttgaggtgaaaggagcaatccggtgtgaggtgggctcgcgtctgattagatagttggtgaggtaacggcccaccaagtcaacgatcagtagccgacctgagagggtgatcggccacattgggactgagacacggcccagactcctacgggaggcagcagtggggaatattgggcaatgggcgcaagcctgacccagcaacgccgcgtgaaggaagaaggttttcggatcgtaaacttctgtccttggtgaagatagtgacggtagccaaggaggaagccccggctaactacg

SEQ ID NO: 7762 - DNA, 490 bp, unidentified
  misc_feature 1..490: note = Ascusbbf_48112, encodes 16S rRNA
  source 1..490: mol_type = genomic DNA
agagtttgatcctggctcaggatgaacgctggcggcaggcttaatacatgcaagtcgaacggtaaggccgagcgtagcaatacgtgaggtacacgagtggcgcacgggtgcgtaacgcgtatgcaacctgcccccgaccgggacaaaacgtcgagaaattggcgctaatatcccatgtggacaccggatggcatcttccggtgtctaaagattcattggtcggggatgggcatgcgtatcattagctggttggcggggtaacggcccaccaaggcgacgatgattaggggttctgagaggatggtcccccacactggaactgagacacggtccagactcctacgggaggcagcagtagggaatattgggcaatggaagcaattctgacccagccatgccgcgtgcaggaagacggccctatgggttgtaaactgctttttccgcggagtaaccgccgggacgtgtcccggcctgagagtacgcggggaat

SEQ ID NO: 7763 - DNA, 490 bp, unidentified
  misc_feature 1..490: note = Ascusbbf_53555, encodes 16S rRNA
  source 1..490: mol_type = genomic DNA
agagtttgatcatggctcaggatgaacgctagctacaggcttaacacatgcaagtcgaggggcagcatgatcaaagcttgctttgattgatggcgaccggcgcacgggtgcgtaacgcgtatccaacctgccgtgtactccgggatagccctctgaaaggaggattaataccggatgtggtcgggtgaagacatctttactcgattaaagattttatcggtacaccgatggggatgcgtacgattaggtagtcggcggggtaacggcccaccgagccaacgatcgttaggggttctgagaggaaggtcccccacataggaactgagacacggtcctaactcctacgggaggcagcagtgaggaatattggtcaatgggcgagagcctgaaccagccaagtagcgtgaaggacgactgccctatgggttgtaaacttcttttataggggaataaagtgcggcacgtgtgccgttttgtatgtaccctatga

SEQ ID NO: 7764 - DNA, 490 bp, unidentified
  misc_feature 1..490: note = Ascusbbf_35758, encodes 16S rRNA
  source 1..490: mol_type = genomic DNA
agagtttgatcatggctcaggatgaacgctagctacaggcttaacacatgcaagtcgaggggcagcatgagagtagcttgctacttttgatggcgaccggcgaatgggtgagtaacgcgtatccaacctgccgcacacccgggaatagcccttggaaatgaggattaagtcccgatatgcatggtagtcgcatgactactgtgtgaacccaggtatgcgatggggatgcgtccgattagcttgccggcggggtaacggcccaccggggcatcgatcggtaggggttctgagaggaaggtcccccacactggtactgagacacggaccagactcctacgggaggcagcagtgaggaatattggtcaatggacgagagtctgaaccagccaagtagcgtgcaggatgacggccctatgggttgtaaactgctttttccggggaataacatgtgccacgtgtggcactttgcatgtacccggtgaataaggac

SEQ ID NO: 7765 - DNA, 490 bp, unidentified
  misc_feature 1..490: note = Ascusbbf_1235066, encodes 16S rRNA
  source 1..490: mol_type = genomic DNA
agagtttgatcctggctcaggatgaacgctggcggcgtgcttaacacatgcaagtcgaacgaagcactgaaagcttgcttttggtgacttagtggcggacgggtgagtaacgcgtgggtaacctgcctcacacagggggataacagttggaaacgaccgctaataccgcataacccgctagggccgcatggcccggacggaaagatttatcggtgtgagatggacccgcgtctgattagatagttggcagggtaacggcctaccaagtcgacgatcagtagccggcctgagagggtgaacggccacattgggactgagacacggcccaaactcctacgggaggcagcagtggggaatattgcacaatgggggaaaccctgatgcagcgacgccgcgtgagtgaagaagtatttcggtatgtaaagctctatcagcagggaagaaaatgacggtacctgactaagaagccccggctaactacgtgccagca

SEQ ID NO: 7766 - DNA, 490 bp, unidentified
  misc_feature 1..490: note = Ascusbbf_136510, encodes 16S rRNA
  source 1..490: mol_type = genomic DNA
agagtttgatcctggctcaggacgaacgctggcggcgtgcctaacacatgcaagtcgaacggagttgaattgaatgaagttttcggatggaattcgatttaacttagtggcggacgggtgagtaacgcgtgagtaacctgccgatgagagggggataacgttctgaaaagaacgctaataccgcatgacatatcgaagccgcatgactttgatatcaaaggagcaatccgctcatcgatggactcgcgtccgattagctagttggcggggtaacggcccaccaaggcgacgatcggtagccggactgagaggttgaacggccacattgggactgagacacggcccagactcctacgggaggcagcagtgggggatattgcgcaatggggggaaccctgacgcagcaacgccgcgtgaaggatgaaggtcttcggattgtaaacttcttttgttaaggacgaagaaagtgacggtacttaacgaataagct

SEQ ID NO: 7767 - DNA, 490 bp, unidentified
  misc_feature 1..490: note = Ascusbbf_120217, encodes 16S rRNA
  source 1..490: mol_type = genomic DNA
agagtttgatcatggctcaggatgaacgctagcggcaggcttaacacatgcaagtcgaggggcagcgcggagtagcaatactctggcggcgaccggcgcacgggtgcgtaacgcgtatgcaacctgcctgtaacagggggataacccggagaaatttggactaataccgcatattgccgcgggtcagcattggtttgcggcgaaaggagcgatccggttacagatgggcatgcgtgacattaggtagttggcggggcaacggcccaccaagccgacgatgtctaggggaactgagaggttagtcccccacactggtactgagacacggaccagactcctacgggaggcagcagtgaggaatattggtcaatggacggaagtctgaaccagccatgccgcgtgcgggaggaaggccctacgggttgtaaaccgcttttacgggggagcaataagcgccgtgcgcggcgtgatgagagtaccccgggaataa

SEQ ID NO: 7768 - DNA, 490 bp, unidentified
  misc_feature 1..490: note = Ascusbbf_86027, encodes 16S rRNA
  source 1..490: mol_type = genomic DNA
agagtttgatcctggctcaggacgaacgctggcggcgcgcctaacacatgcaagtcgaacgggatttttaattaagattcttcggatgattgattataaatctagtggcggacgggtgagtaacgcgtgagtaacctgcctttcagagggggataacgtttggaaacgaacgctaataccgcataagattgtagtatcgcatggtacagcaatcaaaggagcaatccgctgaaagatggactcgcgtccaattagctagttggtgaggtaacggcccaccaaggcgacgattggtagccggactgagaggttgaacggccacattgggactgagacacggcccagactcctacgggaggcagcagtggggaatattgcacaatgggggaaaccctgatgcagcgacgccgcgtgagggaagaaggttttcggattgtaaacctctgtccttggtgaagaagatgactgtagccaaggaggaagccacggc

SEQ ID NO: 7769 - DNA, 490 bp, unidentified
  misc_feature 1..490: note = Ascusbbf_163756, encodes 16S rRNA
  source 1..490: mol_type = genomic DNA
agagtttgatcctggctcaggatgaacgctagcggcaggcctaacacatgcaagtcgaggggcagcgcggtgtggcaacacactggcggcgaccggcggatgggtgcgtaacgcgtatgcaacctgcctccgagagggggataacccgtggaaacgcggactaataccccgtatgcgcacgacgccgcatgacgttgtgcggaaagattgattgctcggagatgggcatgcgtggcattaggtagttggcggggcaacggcccaccaagccatcgatgcctaggggagctgagaggctaatcccccacactggtactgagacacggaccagactcctacgggaggcagcagtgaggaatattggtcaatggagggaactctgaaccagccatgccgcgtgagggaagacggccctatgggttgtaaacctcttttagccgggagcaataagggtcccgcggggcccgacgagagtaccggcggaataagc

SEQ ID NO: 7770 - DNA, 490 bp, unidentified
  misc_feature 1..490: note = Ascusbbf_199087, encodes 16S rRNA
  source 1..490: mol_type = genomic DNA
agagtttgatcctggctcaggatgaacgctggcggcatgcctaagacatgcaagtcgaacgagatggcccaatgaaggttgagtgcttgcacaagactggatttggatttccatctagtggcagacgggtgagtaacacgtgggtgacctaccttttcgttggggataacagttggaaacgattgctaataccgaataagatatatgagtcaattatatattgaaaggagcctttaaagcttcgcgattagatgggcctgcggcgtattaacttgttggcggggtaatggcccaccaaggtgacgatgcgtagccgaactgagaggttgatcggccacactgggactgagacacggcccagactcctacgggagacagcagttaggaatattcgtcaatggaggaaactctgaacgagcaatgccgcgtgagtgatgaaggtctttggattgtaaaactctgttgtatagaaaaaattactaggttagga

SEQ ID NO: 7771 - DNA, 490 bp, unidentified
  misc_feature 1..490: note = Ascusbbf_203849, encodes 16S rRNA
  source 1..490: mol_type = genomic DNA
agagtttgatcctggctcaggatgaacgctagcggcaggcttaacacatgcaagtcgaggggcagcgcggggtagcaataccctggcggcgaccggcgcacgggtgcgtaacgcgtatgcaacctgcccgtaacaggggtataacggggagaaatccccactaatcccccatattgtcctgatgccgcatggcgttaggacgaaagccttggtggttacggacgggcatgcgtgacattaggtagttggcggggcaacggcccaccaagccgacgatgtctaggggagctgagaggcaggacccccacactggtactgagacacggaccagactcctacgggaggcagcagtgaggaatattggtcaatgggcggaagcctgaaccagccatgccgcgtggaggaagacggccctatgggttgtaaactccttttgccgcagagtaataagggccgtgcgcggcctgatgagagtatgcggcgaataagc

SEQ ID NO: 7772 - DNA, 466 bp, unidentified
  misc_feature 1..466: note = Ascusbbf_559411, encodes 16S rRNA
  source 1..466: mol_type = genomic DNA
agagtttgatcatggctcagaacgaacgctggcggcaggcttaacacatgcaagtcgaacgccccgcaaggggagtggcagacgggtgagtaacgcgtgggaatctacccaattcttcggaacaacacatggaaacgtgtgctaataccgaatgagcccttcgggggaaagatttatcggaattggatgagcccgcgttggattagctagttggtggggtaaaggcctaccaaggcgacgatccatagctggtctgagaggatgatcagccacactgggactgagacacggcccagactcctacgggaggcagcagtggggaatattggacaatgggcgcaagcctgatccagccatgccgcgtgagtgatgaaggtcttaggattgtaaagctctttcaccggtgaagataatgacggtaaccggagaagaaccccggctaacttcgtgccagcagccgcggtat

SEQ ID NO: 7773 - DNA, 490 bp, unidentified
  misc_feature 1..490: note = Ascusbbf_124587, encodes 16S rRNA
  source 1..490: mol_type = genomic DNA
agagtttgatcctggctcaggatgaacgctggcggcgtgcctaacacatgcaagtcgaacggttaacccgccttcgggcggtcataaagtggcgaacgggtgagtaacacgtgaccaacctgccccgcgctccgggacagcctcgcgaaagcgggattaataccggatgcaccgcacctttcgcatgatcggtgcgggaaagctccggcggcgcgggatggggtcgcggcccatcaggtagacggtcgggtagaggccgaccgtgcctacgacgggtagccgggttgagagaccgaccggccacattgggactgagatacggcccagactcctacgggaggcagcagtggggaatattgcgcaatgggggaaaccctgacgcagcaacgccgcgtgcgggatgacggccctcgggttgtaaaccgctttcagcagggaagacatcgacggtacctgcagaagaagccccggctaactacgtgccagcagc

SEQ ID NO: 7774 - DNA, 490 bp, unidentified
  misc_feature 1..490: note = Ascusbbf_637926, encodes 16S rRNA
  source 1..490: mol_type = genomic DNA
agagtttgatcctggctcaggatgaacgctagctacaggcttaacacatgcaagtcgaggggcagcgctggggttgcttgcaacccctggcggcgaccggcggatgggtgagtaacgcgtatccaacctgcccctgtcccggggacagcccttagaaatgaggattaacccccgatggcgtgcgtggcccgcatgggtcttgcactaaatgcgaaggacggggatggggatgcgttccattaggcagcaggcggggtaacggcccacctggccgacgatggataggggttctgagaggaaggtcccccacactggtactgagacacggaccagactcctacgggaggcagcagtgaggaatattggtcaatgggcggaagcctgaaccagccaagtagcgtgcgggatgaaggccctacgggttgtaaaccgcttttgcgcgcggataaagagggggactggtcccccgttgcaggtagcgcgcgaataa

SEQ ID NO: 7775 - DNA, 490 bp, unidentified
  misc_feature 1..490: note = Ascusbbf_1868565, encodes 16S rRNA
  source 1..490: mol_type = genomic DNA
agagtttgatcatggctcaggacgaacgctggcggcgtgcttaacacatgcaagtcgagcggtaaggcccttcggggtacacgagcggcgaacgggtgagtaacacgtgagtaatctgcccttcacttcgggataaccaccggaaacggtggctaataccggatatgacttctcttcgcatgttgagaggtggaaagttctggcggtggaggatgtgctcgcggcctatcagcttgttggtgaggtaatggctcaccaaggcttcgacgggtagccggcctgagagggtgaccggccacactgggactgagacacggcccagactcctacgggaggcagcagtggggaatattggacaatgggcgaaagcctgatctagcaacgccgcgtgagggatgactgccttcgggttgtaaacctctttcagtaccgacgaagcgcaagtgacggtaggtacagaagaagcaccggccaactacgtgccagcagc

SEQ ID NO: 7776 - DNA, 490 bp, unidentified
  misc_feature 1..490: note = Ascusbbf_739788, encodes 16S rRNA
  source 1..490: mol_type = genomic DNA
agagtttgatcatggctcaggatgaacgctggcggcgtgcttaacacatgcaagttgaacagacgaggcggagcttgctctgccgagttagtggcagacgggtgagtaacgcgtgagcaacctgcctttcagagggggacaacgttgggaaaccggcgctaataccgcataatatgcttttgccgcatgacagaagtatcaaaggagcaatccgctgaaagatgggctcgcgtctgattagatagttggtgaggtaacggcccaccaagtcgacgatcagtagccggactgagaggttgaacggccacattggaactgagatacggtccagactcctacgggaggcagcagtggggaatattgggcaatgggcgcaagcctgacccagcaacgccgtgtgaaggaagaaggtcttcggattgtaaacttttgtcttatgggacgatcatgacggtaccataggaggaagtcacgactaactacgtgccag

SEQ ID NO: 7777 - DNA, 490 bp, unidentified
  misc_feature 1..490: note = Ascusbbf_207952, encodes 16S rRNA
  source 1..490: mol_type = genomic DNA
agagtttgatcatggctcaggatgaacgctagcggcaggcttaacacatgcaagtcgaggggcagcacgagtgtttacacttggtggcgaccggcgcaagggtgcgtaacgcgtgagcaacatgcccgtatcagggggataatccagggaaacttggtctaataccgcataataaatcttgaaggcatcttcatggattttaaaatttcgatggatacggattggctcgcgtgacattagctagatggtaaggtaacggcttaccatggcaatgatgtctaggggttctgagaggaaggtcccccacactggaactgagacacggtccagactcctacgggaggcagcagtgaggaatattggacaatggatggaaatctgatccagccatgccgcgtgcaggaagacggtcctatggattgtaaactgcttttatatgggagcaataagaactacgtgtagttcgatgagagtaccatatgaataagca

SEQ ID NO: 7778 - DNA, 490 bp, unidentified
  misc_feature 1..490: note = Ascusbbf_234125, encodes 16S rRNA
  source 1..490: mol_type = genomic DNA
agagtttgatcatggctcaggacgaacgctggtggcgtgcttaacacatgcaagtcgaacgatgaagcccagcttgctgggtggattagtggcgaacgggtgagtaatacgtgagcaacgtgcccaagacactgggataacctagcgaaagccaggctaataccggatatgagagaacggggcatcctgttttttggaaagattttttggtcttggatcggctcacggcctatcagtttgttggtgaggtaacggctcaccaagactacgacaggtagccggcctgagagggtgatcggccacactgggactgagacacggcccagactcctacgggaggcagcagtggggaatattgcacaatgggcgaaagcctgatgcagcaacgccacgtgggggacgaaggccttcgggttgtaaacctcttttagcgggaaataagggaaactgaaggtacccgcagaaaaagcaccggctaactacgtgccag

SEQ ID NO: 7779 - DNA, 490 bp, unidentified
  misc_feature 1..490: note = Ascusbbf_612933, encodes 16S rRNA
  source 1..490: mol_type = genomic DNA
agagtttgatcctggctcaggattaacgctggcggcgtgcctaacacatgcaagtcgaacgaaatatcttcggatatttagtggcgaacgggtgagtaatgtacaggtaatgtacctccgtactgcgaataacaagctgaaaagtttgctaatacggaatagtttcatcgaggggcatcccttgatgaataaagatttatcgtgcggagatcagcctgtatcctattagttagttggtggggtaatggcctaccaagacgacgatgggtaactggtctgagaggatgagcagtcacattggaactgagatacggtccaaactcctacgggaggcagcagtgaggaattttgcgcaatggggggaaccctgacgcagcaacgccgcgtgagtgatgacggctttcgggttgtaaagctctgtcgtgtatggcgagtagggacggtaatacacaaggaagcctcggctaactacgtgccagcagccgcggta

SEQ ID NO: 7780 - DNA, 490 bp, unidentified
  misc_feature 1..490: note = Ascusbbf_67925, encodes 16S rRNA
  source 1..490: mol_type = genomic DNA
agagtttgatcctggctcaggatgaacgctggcggcgtgcctaatacatgcaagtcgaacgaaactacttcggtagtttagtggcgaacgggtgagtaacacatgaacaacctaccctgacgacagggataacagtttgaaaagactgctaatacctgataggtgaagagggggcatctccatttcattaaagttgggctacaacacgacaggatgggttcatgtcgcattagctagttggcggggtaacggcccaccaaggcgatgatgcgtagccgatctgagaggatgaccggccacattgggactgagacacggcccagactcctacgggaggcagcagtagggaattttcggcaatgggcggaagcctgaccgagcaacgccgcgtgaacgaagacggtctttggattgtaaagttctgttacgagggaagaataacacgtatagggaatgatatgtgcgtgacggtacctcgccagaaagccac

SEQ ID NO: 7781 - DNA, 490 bp, unidentified
  misc_feature 1..490: note = Ascusbbf_717449, encodes 16S rRNA
  source 1..490: mol_type = genomic DNA
agagtttgatcctggctcaggatgaacgctagcggcaggcctaatacatgcaagtcggacggtatcccgttttcggacgggagagagtggcgcacgggtgcgtaacgcgtatgcaacctgccctatactgtgggatagcccggggaaacccggattaataccgcatgttaccggttacgggcatccgtatccggtcaaagatttatcggtataggatgggcatgcgtaggattagctagttggcggtgtaacggaccaccaaggcgatgatccttaggggttctgagaggaaggtcccccacactggcactgagatacgggccagactcctacgggaggcagcagtagggaatattgggcaatgggcgggagcctgacccagccatgccgcgtgcaggaagacggcgttctgcgttgtaaactgcttttatacgggaagaaaaggcccatgcgtgggacattgccggtaccgtatgaataagcaccggct

SEQ ID NO: 7782 - DNA, 490 bp, unidentified
  misc_feature 1..490: note = Ascusbbf_238538, encodes 16S rRNA
  source 1..490: mol_type = genomic DNA
agagtttgatcctggctcaggatgaacgctggcggcaggcttaatacatgcaagtcgaacggtaaggccgagtgcagcaatgcacgaggtacacgagtggcgcacgggtgcgtaacgcgtatgcaacctgcccttcaccgggacaaaacagctggaaacggctgctaatatcccatggttacgagaggtggcatcaccattcgtataaagattcattggtgagggatgggcatgcgtattattaggtagttggcggggtaacggcccaccaagccgacgatgattaggggttctgagaggattaacccccacactggaactgagacacggtccagactcctacgggaggcagcagtagggaatattgggcaatggaggcaactctgacccagccatgccgcgtgaaggaagacggccctatgggttgtaaacttcttttgtcgcagagtaaagtcggtcacgcgtggccgtttgagagtatgcgacgaat

SEQ ID NO: 7783 - DNA, 490 bp, unidentified
  misc_feature 1..490: note = Ascusbbf_8890, encodes 16S rRNA
  source 1..490: mol_type = genomic DNA
agagtttgatcatggctcaggatgaacgctagcggcaggcttaacacatgcaagtcgaggggcagcgagggtagcaatacctgtcggcgaccggcggaagggtgcgtaacgcgtgagcaacttgcccgtatctgggggatagtcattggaaacgatgcgtaataccccataacaacagaggctgcatgacctttgtttgaaagcgattagtggatacggataggctcgcgagacattagctagttggtggggtaacggcccaccaaggcgacgatgtctaggggttctgagaggaaggtcccccacattggaactgagacacggtccaaactcctacgggaggcagcagtgaggaatattggtcaatggccggaaggctgaaccagccatgccgcgtgcaggaataaggccctatgggtcgtaaactgcttttgtggtggagcaataagacgtacgcgtacgtcgatgagagtacatcacgaataagcat

SEQ ID NO: 7784 - DNA, 490 bp, unidentified
  misc_feature 1..490: note = Ascusbbf_85756, encodes 16S rRNA
  source 1..490: mol_type = genomic DNA
agagtttgatcatggctcaggatgaacgctagctacaggcttaacacatgcaagtcgaggggcagcacgtgggtagcaataccctgggtggcgaccggcgcacgggtgagtaacgcgtatccaacctggcccatagtagggaacagcccggcgaaagtcggattaatgccctatgttttcctcagtgagcattttatgaggaacaaagacttgtcgctatgggatggggatgcgtccgattaggcagcaggcggggcaacggcccacctggccttcgatcggtaggggttctgagaggaaggtcccccacactggtactgagacacggaccagactcctacgggaggcagcagtgaggaatattggtcaatgggcgtaggcctgaaccagccaagtagcgtgcgggacgacggccctatgggttgtaaaccgcttttgcacgggaataaagtgggggacgtgtccccttttgcatgtaccgtgagaataa

SEQ ID NO: 7785 - DNA, 490 bp, unidentified
  misc_feature 1..490: note = Ascusbbf_510440, encodes 16S rRNA
  source 1..490: mol_type = genomic DNA
agagtttgatcctggctcaggatgaacgctagctacaggcttaacacatgcaagtcgagcggaacttcttcggaagtttagcggcagacgggtgagtaacacgtatccaacctttcccttactcgggtatagcctcgggaaactgagagtaatccccgatgaagtgtacgaggagcattttttgcacaccaaagattaatcggtgaggggtggggatgcgttccattaggtagtaggcggggcaacggcccacctagccgatgatggataggggttctgagaggaaggtcccccacattggaactgcgaaacggtccaaactcctacgggaggcagcagtgaggaatattggtcaatggacgagagtctgaaccagccaagtagcgtgcaggatgacggccctatgggttgtaaactgcttttgtgcgggaataacgttgtgctcgtgagcgcaagtgcatgtaccgtacgaataaggatcggctaactc

SEQ ID NO: 7786 - DNA, 490 bp, unidentified
  misc_feature 1..490: note = Ascusbbf_18608, encodes 16S rRNA
  source 1..490: mol_type = genomic DNA
agagtttgatcatggctcaggatgaacgctagcggcaggcttaacacatgcaagtcgaggggcagcgaggagtagcaatactttgtcggcgaccggcagacgggtgcgtaacgcgtatgcaacctacccatcacaggggtatagcccggcgaaagccggaataatcccccatggttccacaatttcgcatgttattgtggataaacgggtgaccgggtgatggatgggcatgcgtggcattaggcagttggcggggtaacggcccaccaaaccgacgatgcctaggggtcctgagagggaggtcccccacattggaactgagacacggtccaaactcctacgggaggcagcagtgaggaatattggtcaatgggcgagagcctgaaccagccatgccgcgtgcaggaagacggccttatgggttgtaaactgcttttattggggacgagcatgactacgtgtagtcaaatgacggtacccgatgaataag

SEQ ID NO: 7787 - DNA, 490 bp, unidentified
  misc_feature 1..490: note = Ascusbbf_156715, encodes 16S rRNA
  source 1..490: mol_type = genomic DNA
agagtttgatcatggctcaggacgaacgctggcggcgtgcctaacacatgcaagtcgaacgaagcatctggagctgatttcttcggaatgacgcaccttatgactgagtggcggacgggtgagtaacacgtgagcaacctgcccttcggtgaggaatagcagctggaaacggctggtaatacctcatgacatagtccattcgcatgtttggactatcaaagatttatcgccgatggatgggctcgcgtccgattaggtagttggtgaggtaacggcccaccaagccgacgatcggtagccggactgagaggttgatcggccacattgggactgagacacggcccagactcctacgggaggcagcagtgggggatattgcacaatgggcgcaagcctgatgcagcaacgccgcgtgcgggaagacggccttcgggttgtaaaccgctgtccttagtgaagaacacaatgacggtagctatggaggaagcca

SEQ ID NO: 7788 - DNA, 490 bp, unidentified
  misc_feature 1..490: note = Ascusbbf_130009, encodes 16S rRNA
  source 1..490: mol_type = genomic DNA
agagtttgatcctggctcaggatgaacgctggcggcgtgcttaacacatgcaagtcgaacgaagcatccctcccgaagaagcggaagtgcttgcacagaagtggattcatttgggatgacttagtggcggacgggtgagtaacgcgtgggcaacctgccctatagagggggacaacagttagaaatgactgctaataccgcatagtaatgcagatccgcatgcttctgcattgaaagcttttgcgctataggatgggcccgcgtttgattagctagttggtgaggtaacggcccaccaaggcgacgatcaatagccggcttgagagagtgaacggccacattgggactgagacacggcccaaactcctacgggaggcagcagtggggaatattgcacaatgggggaaaccctgatgcagcgacgccgcgtgagtgaagaagtatttcggtatgtaaagctctatcagcaggaaagataatgacggtacct

SEQ ID NO: 7789 - DNA, 490 bp, unidentified
  misc_feature 1..490: note = Ascusbbf_549989, encodes 16S rRNA
  source 1..490: mol_type = genomic DNA
agagtttgatcatggctcagattgaacgctggcggcaggcctaatacatgcaagtcgaacggcagcgggggcttcggcccgccggcgagtggcgaacgggtgagtaatgcatcggaacgtacccagtcgtgggggataacgcagcgaaagctgtgctaataccgcatacgtcctgagggagaaagcgggggaccttcgggcctcgcgcgattggagcggccgatgtcggattagctagttggtggggtaaaggctcaccaaggcgacgatccgtagctggtctgagaggatgatcagccacactgggactgagacacggcccagactcctacgggaggcagcagtggggaattttggacaatgggggcaaccctgatccagccatgccgcgtgagtgaagaaggccttcgggttgtaaagctctttcagtcgggaagaaacggagcgctctaacatagcgctctactgacggtaccgacagaagaagcac

SEQ ID NO: 7790 - DNA, 490 bp, unidentified
  misc_feature 1..490: note = Ascusbbf_47706, encodes 16S rRNA
  source 1..490: mol_type = genomic DNA
agagtttgatcatggctcaggatgaacgctggcggcgtgcctaacacatgcaagtcgagcgagaaattgcagattgaaacttcggtcgaaagaagcgatggacagcggcggacgggtgagtaacgcgtaggtaacctaccttgagctgagggatagcctagggaaacctggattaataccacataatgcggatgagtcacatggctcatcagccaaagatttatcggcccaagatggacctgcgtctgattagatagttggtgaggtaacggcccaccaagtcgacgatcagtagccgatctgagaggataatcggccacattggaactgagacacggtccaaactcctacgggaggcagcagtggggaatattgcacaatgggcgcaagcctgatgcagcaacgccgcgtgagcgaagaaggtcttcggatcgtaaagctctgtccttggggaagaagaaagtgacggtacccgaggaggaagccccgg

SEQ ID NO: 7791 - DNA, 490 bp, unidentified
  misc_feature 1..490: note = Ascusbbf_221533, encodes 16S rRNA
  source 1..490: mol_type = genomic DNA
agagtttgatcatggctcaggatgaacgctggcggcgtgcttaacacatgcaagtcgaacggagatataattaggaagttttcggatggaatgaatatatcttagtggcggacgggtgagtaacacgtaaacaatctgccttcgagagcgggacaacagatagaaatatttgctaataccgcataagaccacaggtacgcatgtactaggggtcaaagggagcaatccgctcggagatgagtttgcggactattagctagttggtgaggtaatggcccaccaaggcagagatggttagccgacctgagagggtgatcggccacactggaactgagacacggtccagactcctacgggaggcagcagtgaggaatattgggcaatggagggaactctgacccagcaacgccgcgtgaaggaagaaggttttcggattgtaaacttctgttatggaggaaaaaggaagtgatggtactccatgagcaagcta

SEQ ID NO: 7792 - DNA, 489 bp, unidentified
  misc_feature 1..489: note = Ascusbbf_172279, encodes 16S rRNA
  source 1..489: mol_type = genomic DNA
agagtttgatcatggctcaggacgaacgctggcggcgtgcctaacacatgcaagtcgagcgaggtatttatacctagcggcggacgggtgagtaacacgtgggtaacctacctcagagaggggaatagccttccgaaaggaagattaataccgcataatatacacatttagcattatgagtgtatcaaaggagaaatccgctttgagatgggcccgcggcgcattagctagttggggaggtaacggctccccaaggcgacgatgcgtagccgacctgagagggtgatcggccacattggaactgagacacggtccagactcctacgggaggcagcagtggggaatattgcacaatggggggaaccctgatgcagcaacgccgcgtgaatgacgaaggctttcgggtcgtaaagttctttgatgggggatgacaatgacagtaccccaaaaacaagccacggctaactacgtgccagcagccgcggtaat

SEQ ID NO: 7793 - DNA, 490 bp, unidentified
  misc_feature 1..490: note = Ascusbbf_354817, encodes 16S rRNA
  source 1..490: mol_type = genomic DNA
agagtttgatcctggctcagaacgaacgctggcggcgtgcttaatacatgcaagtcgaacgtgattttcgtagcaatacgggatgaaagtggcgaacgggtgagtaacacgtaagtaatctgccttcaagtttgggataaccctgccaacgcggggctaataccggatgtggtcctgctgactcatgtgagcgggattaaaggtcgcaagaccgcttggagatgagcttgcggcccattagcttgttggtgaggtaacggctcaccaaggcagggatgggtagccggcctgagagggtgtacggccacattgggactgagatacggcccagactcctacgggaggcagcagtagggaattttgcgcaatggacggaagtctgacgcagcaacgccgcgtgaaggatgactgccttcgggttgtaaacttctgttggatgggaaaaaaagcccttacgggaattgatggtaccattcgagtaagcaccggc

SEQ ID NO: 7794 - DNA, 490 bp, unidentified
  misc_feature 1..490: note = Ascusbbf_631499, encodes 16S rRNA
  source 1..490: mol_type = genomic DNA
agagtttgatcatggctcaggataaacgctggcggcgcacataagacatgcaagtcgaacggaccaaatacattgtttacattgtaagaggttagtggcggactggtgagtaacacgtaagcaacctgcctattagaggggaataacactgaggaatcagtgctaataccgcataagctagtagtaccgcatggtacagctagaaaaggagtaatccgctaatagatgggcttgcggctgattagctagttggtgtggtaaaggcataccaaggcaacgatcagtagccggactgagaggttgaacggccacattgggactgagatacggcccagactcctacgggaggcagcagtcgggaatattgcgcaatggagggaactctgacgcagtgacgccgcgtataggaagaaggttttcggattgtaaactattgtcgttagggaagaaaaggacagtacctaaggaggaagccccggctaactatgtg

SEQ ID NO: 7795 - DNA, 490 bp, unidentified
  misc_feature 1..490: note = Ascusbbf_149878, encodes 16S rRNA
  source 1..490: mol_type = genomic DNA
agagtttgatcctggctcaggatgaacgctggcggcgtgcataacacattcaagtcgaacgaagcaccggcgaggaagtcttcggatggaattgcccttgacttagtggcggacgggtgagtaacgcgtgagcaaccttcctgtttgtgagggataacacagggaaacttgtgctaataccgcatgacgcatgggaatcgcatggtttcgatgccaaagatttattgcagacagatgggctcgcgtctgattagatagttggcagggtaacggcctaccaagtcgacgatcagtagccggactgagaggttgaacggccacattggaactgagagacggtccagactcctacgggaggcagcagtggggaatattgggcaatgggcgaaagcctgacccagcgacgccgcgtgagggaagaaggtcttcggattgtaaacctctttcagcaaggaagaagaaagtgacggtacttgcagaagaagccacg

SEQ ID NO: 7796 - DNA, 490 bp, unidentified
  misc_feature 1..490: note = Ascusbbf_1372237, encodes 16S rRNA
  source 1..490: mol_type = genomic DNA
agagtttgatcatggctcaggatgaacgctagcggcaggcttaacacatgcaagtcgaggggcagcgcggggtagcaatactctggcggcgaccggcggaagggtgcgtaacgcgtgagcaacttgcccgtcactggaggataggcactggaaacggtgtgtaatactccataacataagaattcgcatgagtttttattgaaagattcattggtgacggatgggctcgcgagacattggctggtcggcggggtaacggcccaccgaggctacgatgtctaggggttctgagaggaaggtcccacgaactggaactgagaaacggtccagacgcctacgggaggcagcagtgaggaagattgggcaatgggcggaagcctgaaccagccatgccgcgtgaaggaataaggccctatgggtcgtaaacttcttttctgtgagggcaagaaggagcacgagtggtccgatgagagtatcaggggaataagca

SEQ ID NO: 7797 - DNA, 490 bp, unidentified
  misc_feature 1..490: note = Ascusbbf_1244159, encodes 16S rRNA
  source 1..490: mol_type = genomic DNA
agagtttgatcctggctcagattgaacgctggcggcatgcttaacacatgcaagtcgaacggcagcacggattagtttactaattgggtggcgagtggcgaacgggtgagtaacgcgtaggaatataccttagagagggggacaacttggggaaactcaagctaataccgcatattatcttaggataaaagctggggaccgtaaggcctggcgctttaagaatagcctgcgtacgattagctagttggtggggtaaaggcctaccaaggcgacgatcgttagctggtctgagaggatgatcagccacactggaactgagacacggtccagactcctacgggaggcagcagtggggaatattggacaatggggggaaccctgatccagcaatgccgcgtgtgtgaagaaggcctgagggttgtaaagcactttcagtagggaggaggtatattgggttaagagctagatatacggacgttacctacagaag

SEQ ID NO: 7798 - DNA, 490 bp, unidentified
  misc_feature 1..490: note = Ascusbbf_10029, encodes 16S rRNA
  source 1..490: mol_type = genomic DNA
agagtttgatcctggctcaggacgaacgctggcggcgtgcttaacacatgcaagtcgaacgagaggacaagagaagcttgcttcttttggaatcgagtggcaaacgggtgagtaacacgtaaacaacctgccttcaggatggggacaacagacggaaacgactgctaataccgaatacgcttggaagaccgcatgatcttccaaggaaagggtggcctctacctgtaagctatcgcctgaagaggggtttgcgtctgattaggcagttggtgaggtaacggcccaccaaacctacgatcagtagccggtctgagaggatgaacggccacactggaactgagacacggtccagactcctacgggaggcagcagtggggaatcttccgcaatgggcgaaagcctgacggagcaacgccgcgtgagtgatgacggccttcgggttgtaaagctctgtgatcggggacgaacggtccgtaagctaataccttat

SEQ ID NO: 7799 - DNA, 490 bp, unidentified
  misc_feature 1..490: note = Ascusbbf_8450, encodes 16S rRNA
  source 1..490: mol_type = genomic DNA
agagtttgatcctggctcaggatgaacgctagcggcaggcttaacacatgcaagtcgaggggcagcgcggggtagcaatatcctggcggcgaccggcggaagggtgcgtaacgcgtgagcaacttgcccgtcactggaggataggcactggaaacggtgtgtaatactccataacataagttttcgcatgaagatttattgaaagattcattggtgacggatgggctcgcgagacattagctagtcggcggggtaacggcccaccgaggctacgatgtctaggggttctgagaggaaggtcccccacactggaactgagacacggtccagactcctacgggaggcagcagtgaggaatattggtcaatgggcggaagcctgaaccagccatgccgcgtgaaggaataaggccctatgggtcgtaaacttcttttccttgggggcaataaggatcacgtgtggtccgatgagagtaccaggggaataagca

SEQ ID NO: 7800 - DNA, 490 bp, unidentified
  misc_feature 1..490: note = Ascusbbf_22451, encodes 16S rRNA
  source 1..490: mol_type = genomic DNA
agagtttgatcctggctcagattgaacgctggcggcatgctttacacatgcaagtcgaacggcagcgggggcttcggcctgccggcgagtggcgaacgggtgagtaatgcatcggaacgtgcccatgtcgtgggggataactacgcgaaagcgtggctaataccgcatacgccctgagggggaaagcgggggatctttcgggacctcgcgcgattggagcggccgatgtcggattagctagttggtggggtaaaggctcaccaaggcgacgatccgtagctggtctgagaggatgatcagccacactgggactgagacacggcccagactcctacgggaggcagcagtggggaattttggacaatgggcgcaagcctgatccagccatgccgcgtgagtgaagaaggccttcgggttgtaaagctctttcggccgggaagaaatcgcattctctaatataggatgtggatgacggtaccggactaagaag

SEQ ID NO: 7801 - DNA, 490 bp, unidentified
  misc_feature 1..490: note = Ascusbbf_537567, encodes 16S rRNA
  source 1..490: mol_type = genomic DNA
agagtttgatcctggctcaggacgaacgctggcggcgtgcctaatacatgcaagtcgaacggacaagtaaaagcttgctcttatgagttagtggcgcacgggtgagtaatgtatagttaatctgccccttagtggaggacaacagttagaaatgactgctaatactccatactccttcttaacataagttaagtcgggaaagtttttcgctaagggatgagactatattgtatcagctagttggtaaggtaatggcttaccaaggctatgacgcataactggtctgagaggatgatcagtcacactggaactgagacacggtctagactcctacgggaggcagcagtagggaatattgctcaatgggggaaaccctgaagcagcaacgccgcgtggaggatgacacttttcggagcgtaaactccttttgttagggaagaacactgacggtacctaacgaataagcaccggctaactccgtgccagcagc

SEQ ID NO: 7802 - DNA, 490 bp, unidentified
  misc_feature 1..490: note = Ascusbbf_34842, encodes 16S rRNA
  source 1..490: mol_type = genomic DNA
agagtttgatcatggctcagaacgaacgctggcggcgtgcctaacacatgcaagtcgagcgcgcgaggcacttcggtgccgagtgagcggcgcacgggtgaggaacacgtgggtaatgtgccctagaatccggaataacatttcgaaaggagtgctaatgccgggcgaggccacggtcactgcggtgacagcggcagaaggcagggatcagcaatgacctgtcgttttaggagcagctcgcggcccatcagctagttggcggggtaagggcccaccaaggcaacgacgggtagctggtctgagaggacgatcagccacactggaactgagacacggtccagactcctacgggaggcagcagtggggaattttgcgcaatgggcgaaagcctgacgcagcaacgccgcgtgagtgatgaaggtcttcggatcgtaaagctctttcgacaggaaggaaagggtttgggtcaattacccagactttgacagta

SEQ ID NO: 7803 - DNA, 490 bp, unidentified
  misc_feature 1..490: note = Ascusbbf_18694, encodes 16S rRNA
  source 1..490: mol_type = genomic DNA
agagtttgatcatggctcaggatgaacgctagcggcaggcttaacacatgcaagtcgaggggcatcgcgggtagcaatacctggcggcgaccggcgaaagggtgagtaacgcgtgagcaacatgcccgtcacagggggatagtcattggaaacgatgcgtaataccccgtaacatataggatcgcatggttttatattgaaagatttatcggtgacggattggctcgcgtgccattagctagttggcggggtaacggcccaccaaggcgacgatggctaggggttctgagaggaaggtcccccacattggaactgagacacggtccagactcctacgggaggcagcagtgaggaatattggtcaatggccgagaggctgaaccagccatgccgcgtgcgggaggacggccctatgggttgtaaaccgcttttgttggggagcaataatcgctacgtgtagcgagacgagagtacccagcgaataagcatc

SEQ ID NO: 7804 - DNA, 490 bp, unidentified
  misc_feature 1..490: note = Ascusbbf_13340, encodes 16S rRNA
  source 1..490: mol_type = genomic DNA
agagtttgatcatggctcaggacgaacgctggcggcatgcctaacacatgcaagtcgaacggagttgaggagcttgctcttcaacttagtggcggacgggtgagtaacgcgtgagcaacctgcctttaagtggggaataatgtactgaaaaggacactaataccgcataatgtatataggccgcatgacctgtataccaaagatttatcgcttaaagatgggctcgcgtccgattagccagttggtggggtaacggcctaccaaagcgacgatcggtagccggactgagaggttgaacggccacattgggactgagacacggcccagactcctacgggaggcagcagtgggggatattgcgcaatgggggaaaccctgacgcagcaatgccgcgtgaaggatgaaggtcttcggattgtaaacttcttttgtcagggacgaaagatgacggtacctgacgaataagctccggctaactacgtgccagcag

SEQ ID NO: 7805 - DNA, 490 bp, unidentified
  misc_feature 1..490: note = Ascusbbf_11815, encodes 16S rRNA
  source 1..490: mol_type = genomic DNA
agagtttgatcatggctcaggatgaacgctggcggcgtgcctaatacatgcaagtcgaacggagaaaatgagtagcttgctacgagttttcttagtggcggacgggtgagtaacgcatgaacaatctacctacgagagggggataacacttagaaataggtgctaataccgcataagaccacaacccggcatcgggaaggggtaaaaggagaaatccgcttgtagatgagtttgtgtatcattagatagttggtggggtaacggcctaccaagtcgacgatggttagccggcctgagagggtgaacggccacactggaactgagatacggtccagactcctacgggaggcagcagtaaggaatattgggcaatgagcgaaagcttgacccagcaacgccgcgtgaaggaagaaggttctcggattgtaaacttctaaaattggggaaaaagaaagtgatggtacccaaagataagtcacggcaaactatg

SEQ ID NO: 7806 - DNA, 490 bp, unidentified
  misc_feature 1..490: note = Ascusbbf_36875, encodes 16S rRNA
  source 1..490: mol_type = genomic DNA
agagtttgatcatggctcaggacgaacgctggcggcatgcctaacacatgcaagtcgaacggagttggaaggagcttgctcttttcaacttagtggcggacgggtgagtaacgcgtgagcaacctgcctttcagtggggaataatgttttgaaaagaacactaataccgcataatgtattgaaaccgcatgattttgataccaaaggatttattcgctgagagatgggctcgcgtccgattagccagttggtggggtaacggcctaccaaagcgacgatcggtagccggactgagaggttgaacggccacattgggactgagacacggcccagactcctacgggaggcagcagtgggggatattgcgcaatgggggaaaccctgacgcagcaatgccgcgtgaaggatgaaggttttcggattgtaaacttcttttgtcagggacgaaaactgacggtacctgacgaataagctccggctaactacgtgc

SEQ ID NO: 7807 - DNA, 490 bp, unidentified
  misc_feature 1..490: note = Ascusbbf_13589, encodes 16S rRNA
  source 1..490: mol_type = genomic DNA
agagtttgatcatggctcaggacgaacgctggcggcgcgcctaacacatgcaagtcgaacggagcgtaattttgaattcttcggaaggattaattattgcttagtggcggacgggtgagtaacacgtgagcaatctgccttacagatggggacaacgtttagaaatggacgctaatacccaatgaaatatgggttccgcatggagtttatatcaaagggattcgcaagaatttgctgtaagatgagctcgcgtctgattatgatagttggcggggtaatggcccaccaagtctacgatcagtagccgaactgagaggttgatcggccacattgggactgagacacggcccagactcctacgggaggcagcagtgagggatattgcacaatgggggaaaccctgatgcagcgacgtcgcgtgagggaagaaggtttttggattgtaaacctctgtctttggagaagataatgacggtatccaaagaggaag

SEQ ID NO: 7808 - DNA, 490 bp, unidentified
  misc_feature 1..490: note = Ascusbbf_16561, encodes 16S rRNA
  source 1..490: mol_type = genomic DNA
agagtttgatcatggctcaggacgaacgctggcggcatgcctaacacatgcaagtcgaacggagttaagagagcttgctttcttaacttagtggcggacgggtgagtaacgcgtgagcaacctgcctctcagtggggaataatgttctgaaaagagcactaataccgcataacatatatttgtcgcatggcagatatatcaaagatttatcgctgagagatgggctcgcgtccgattagccagttggtggggtaacggcctaccaaagctacgatcggtagccggactgagaggttgaacggccacattgggactgagacacggcccagactcctacgggaggcagcagtgggggatattgcgcaatgggggaaaccctgacgcagcaatgccgcgtgaaggatgaaggtcttcggattgtaaacttcttttgtcagggacgaaaatgacggtacctgacgaataagctccggctaactacgtgccagca

SEQ ID NO: 7809 - DNA, 490 bp, unidentified
  misc_feature 1..490: note = Ascusbbf_62769, encodes 16S rRNA
  source 1..490: mol_type = genomic DNA
agagtttgatcatggctcaggatgaacgctggcggcgtgcctaacacatgcaagtcgagcggagataagttgaagcctagcgattcttatcttagcggcggatgggtgagtaacacgtgggtaacctgccctgtactggggaataacagctggaaacggctgttaatgccgcatatgcgcacggagccgcatgactccgggcggaaagatttatcggtacaggatgggcccgcgccggattaactagttggcggggtaacggcccaccaaggtgatgatccgtagccgacctgagagggtgaccggccacattgggactgagacacggcccaaactcctacgggaggcagcagtgggggatattgcacaatgggggaaaccctgatgcagcgacgccgcgtgaaggatgacgtatttcggtatgtaaacttctatcagcggggaagaagatgacggtacccgactaagaagccccggctaactacgtgcc

SEQ ID NO: 7810 - DNA, 490 bp, unidentified
  misc_feature 1..490: note = Ascusbbf_64076, encodes 16S rRNA
  source 1..490: mol_type = genomic DNA
agagtttgatcatggctcaggacgaacgctggcggcgtgcctaacacatgcaagtcgagcggggatgtccggaacgaagcttcggcggagggaaggacattcgagcggcggacgggtgagtaacgcgtgagcaatctgtccctgacagggggataacacttggaaacaggtgctaataccgcataagaccacgagacgacatcgtcttggggtaaaaggagagatccggtgaggggtgagctcgcgtccgattagctggttggtgaggtaacggcccaccaaggcgacgatcggtagccgacctgagagggtgatcggccacattggaactgagacacggtccaaactcctacgggaggcagcagtgggaatattgggcaatgggcgaaagcctgacccagcaacgccgcgtgagggaagaaggttttcggattgtaaacctctgtccttggtgacgaaggaagtgacggtagccaaggaggaagccccg

SEQ ID NO: 7811 - DNA, 490 bp, unidentified
  misc_feature 1..490: note = Ascusbbf_28044, encodes 16S rRNA
  source 1..490: mol_type = genomic DNA
agagtttgatcatggctcaggacgaacgctggcggcatgcctaacacatgcaagtcgaacgaagttaagaagcttgctttttaacttagtggcggacgggtgagtaacgcgtgagcaacctgcctctaagtggggaataatgtactgaaaaggacactaataccgcataacatattggaagcgcatgattctgatatcaaagatttatcgcttagagatgggctcgcgtccgattagctagttggagaggtaacggctccccaaggcgacgatcggtagccggactgagaggttgaacggccacattgggactgagacacggcccagactcctacgggaggcagcagtgggggatattgcgcaatgggggaaaccctgacgcagcaatgccgcgtgaaggacgaaggtcttcggattgtaaacttcttttgtcagggacgaaaatgacggtacctgacgaataagctccggctaactacgtgccagcagc

SEQ ID NO: 7812 - DNA, 490 bp, unidentified
  misc_feature 1..490: note = Ascusbbf_53766, encodes 16S rRNA
  source 1..490: mol_type = genomic DNA
agagtttgatcatggctcaggatgaacgctggcggcgtgcttaacacatgcaagtcgaacgaagcactgggagcggatcttttcggagagaagcgacctttgactgagtggcggacgggtgagtaacgcgtgggcaacctgcccttgaccgggggacaacagccggaaacagctgctaataccgcataagcgcacaggatcgcatggtccggtgtgaaaaactccggtggtcaaggatgggcccgcgttggattaggtagttggtgcggtaacggcgcaccaagccgacgatccatagccgacctgagagggtgaccggccacattgggactgagacacggcccagactcctacgggaggcagcagtggggaatattgcacaatgggggaaaccctgatgcagcgacgccgcgtgagtgaagaagtatttcggtatgtaaagctctatcagcagggaagaaaatgacggtacctgcacaagaagccccgg

SEQ ID NO: 7813 - DNA, 490 bp, unidentified
  misc_feature 1..490: note = Ascusbbf_97123, encodes 16S rRNA
  source 1..490: mol_type = genomic DNA
agagtttgatcctggctcaggatgaacgctagcggcaggcctaatacatgcaagtcggacgggatctaaatctaagcttgcttagatttagtgagagtggcgcacgggtgcgtaacgcgtgagcaacctacccatatcagggggatagcccggagaaatccggattaacaccgcatgacacaacgactcggcatcgagatgttgttaaatatttataggatatggatgggctcgcgtgacattagctagttggtaaggtaacggcttaccaaggctacgatgtctaggggctctgagaggagaatcccccacactggtactgagacacggaccagactcctacgggaggcagcagtaaggaatattggtcaatggagggaactctgaaccagccatgccgcgtgcaggatgactgccctatgggttgtaaactgcttttgtccaggaataaccaccactacgtgtagtggcttgaatgtactggaagaat

SEQ ID NO: 7814 - DNA, 490 bp, unidentified
  misc_feature 1..490: note = Ascusbbf_26798, encodes 16S rRNA
  source 1..490: mol_type = genomic DNA
agagtttgatcatggctcaggatgaacgctagcggcaggcttaacacatgcaagtcgaggggtaacggggcgtagcaatacgctgccgacgaccggcgcacgggtgcgtaacgcgtatgcaacctacctgtaacagggggataacgggatgaaaatcccactaataccccatatagttagagattcgcatgtttctctaacgaaagcttcggtggttacggatgggcatgcgtgacattagctagttggcggggcaacggcccaccaaggcgacgatgtctaggggagctgagaggcttatcccccacactggtactgagacacggaccagactcctacgggaggcagcagtgaggaatattggtcaatggacggaagtctgaaccagccatgccgcgtggaggaagaaggtcctatgggttgtaaactccttttacgccggagtaataagagccttgcgaggctcgatgagagtacggcgggaataagc

SEQ ID NO: 7815 - DNA, 490 bp, unidentified
  misc_feature 1..490: note = Ascusbbf_41277, encodes 16S rRNA
  source 1..490: mol_type = genomic DNA
agagtttgatcatggctcaggacgaacgctggcggcgtgcctaacacatgcaagtcgaacgggcttaaggagcttgctccttaagttagtggcggacgggtgagtaacgcgtgagcaacctgcctttcagagggggataacgtttggaaacgaacgctaataccgcataacgtgcgaaagtcgcatggcttttgtaccaaaggagtaacatccgctgaaagatgggctcgcgtccgattagacagttggcggggtaacggcccaccaaatctacgatcggtagccggactgagaggttgaacggccacattgggactgagacacggcccagactcctgcgggaggcagcagtgagggatattgcacaatgggcgcaagcctgatgcagcaacgccgcgtgaaggaagacggttttcggattgtaaacttctgttcttggtgaagataatgactttagccaaggagaaagccacggctaactacgtgccag

SEQ ID NO: 7816 - DNA, 490 bp, unidentified
  misc_feature 1..490: note = Ascusbbf_69525, encodes 16S rRNA
  source 1..490: mol_type = genomic DNA
agagtttgatcatggctcaggacgaacgctggcggcgtgcctaacacatgcaagtcgaacggagatactcctaattgagatttcggttgagagagggaatatcttagtggcggacgggtgagtaacgcgtgagtaacctgcccataagagggggataacgttctgaaaaggacgctaataccgcataacatatatttttcgcatgaaaggtatatcaaaggaggaatccgcttatggatggactcgcgtccgattagctagttggcgggataacagcccaccaaggcgacgatcggtagccggactgagaggttgaacggccacattgggactgagacacggcccagactcctacgggaggcagcagtgggggatattgcgcaatgggggaaaccctgacgcagcaacgccgcgtgaatgacgaaggtcttcggattgtaaagttcttttgttgaggaagaaaaatgacggtactcaacgaataagctcc

SEQ ID NO: 7817 - DNA, 490 bp, unidentified
  misc_feature 1..490: note = Ascusbbf_149345, encodes 16S rRNA
  source 1..490: mol_type = genomic DNA
agagtttgatcatggctcaggatgaacgctggcggcgtgcctaacacatgcaagtcgagcggagatatagagagattcttcggatactttctttatcttagcggcggatgggtgagtaacacgtgggtaacctgccctgcacagggggataacagctggaaacggctgttaataccgcatatgcacacgctgccgcatggcagagggtggaaagatttatcggtgcaggatgggcccgcgtcggattaactagttggcagggtaacggcctaccaaggttatgatccgtagccgacctgagagggtgaccggccacattgggactgagacacggcccaaactcctacgggaggcagcagtgggggatattgcacaatgggcggaagcctgatgcagcgacgccgcgtgaaggaagaagtatttcggtatgtaaacttctatcagcggggaagaagatgacggtacccgactaagaagccccggctaacta

SEQ ID NO: 7818 - DNA, 490 bp, unidentified
  misc_feature 1..490: note = Ascusbbf_119024, encodes 16S rRNA
  source 1..490: mol_type = genomic DNA
agagtttgatcatggctcagagcgaacgttagcggcgggcttaacacatgcaagtcgaacgcgaaagtccttcgggatgagtagagtggcgcacgggtgagtaacacgtaggcaatcttccctcgagtgggggacaactacccgaaagggtagctaataccgcataagaccacggcggctccggccgctgcgggaaaagctggcctctacttgtaagctagcgcttgaggatgaacctgcgcaccatcagctagttggtggggtaatggcccaccaaggcgaagacggttagctggtctgagaggatgatcagccacactggcactgaaacacgggccagactcctacgggaggcagcagtggggaatattggacaatgggcgcaagcctgatccagctacgccgcgtgagtgatgaaggccttcgggttgtaaagctctgtggggagggacgaaaaaggtggggactaataagcctcgcccttgacggt

SEQ ID NO: 7819 - DNA, 490 bp, unidentified
  misc_feature 1..490: note = Ascusbbf_54410, encodes 16S rRNA
  source 1..490: mol_type = genomic DNA
agagtttgatcatggctcaggatgaacgctggcggcgtgcttaacacatgcaagtcgaacggagtcacatgaaacctagtgattgtgacttagtggcggacgggtgagtaacgcgtgggtaacctgccgtatgcagggggacaacagagggaaacttctgctaataccgcataagcgcacgggatcgcatgatccagtgtgaaaagatttatcggcatacgatggacccgcgtccgattagctagttggtgaggtaacggcccaccaaggcgacgatcggtagccggcctgagagggtgaacggccacattgggactgagacacggcccaaactcctacgggaggcagcagtggggaatattgcacaatgggggaaaccctgatgcagcgacgccgcgtgagtgatgaagtatttcggtacgtaaagctctatcagcaggaaagaaaatgacggtacctgactaagaagccccggctaactacgtgccag

SEQ ID NO: 7820 - DNA, 490 bp, unidentified
  misc_feature 1..490: note = Ascusbbf_143589, encodes 16S rRNA
  source 1..490: mol_type = genomic DNA
agagtttgatcatggctcaggatgaacgctggcggcgtgcttaacacatgcaagtcgaacgaggttcatttttacgatccccttcgggggtgacgagtttgaaccgagtggcggacgggtgagtaacgcgtgggtaacctgccccatacagggggataacagttggaaacgactgacaataccgcataagcgcacagggaggcatcttctggtgtgaaaaattccggtggtatgggatgggcccgcgtctgattagctagttggcagggtaacggcctaccaaggcgacgatcagtagccgacctgagagggtgaccggccacattgggactgagacacggcccaaactcctacgggaggcagcagtggggaatattgcacaatgggcgaaagcctgatgcagcgacgccgcgtgagtgatgaagtatttcggtatgtaaagctctatcagcagggaagaaaaatgacggtacctgactaagaagccccg

SEQ ID NO: 7821 - DNA, 490 bp, unidentified
  misc_feature 1..490: note = Ascusbbf_215642, encodes 16S rRNA
  source 1..490: mol_type = genomic DNA
agagtttgatcatggctcaggacgaacgctggcggcgtgcctaacacatgcaagtcgaacggagatattgcagatgaagatttcggttggattcagtaatattttagtggcggacgggtgagtaacgcgtgagtaacctgccgatgagagtggaataacgttctgaaaagaacgctaataccgcataacatatatttgccgcatgacagatatatcaaagattttatcgctcattgatggactcgcgtccgattagccagttggcggggtaacggcccaccaaagcgacgatcggtagccggactgagaggttgaacggccacattgggactgagacacggcccagactcctacgggaggcagcagtgggggatattgcgcaatgggggaaaccctgacgcagcaacgccgcgtgaaggaagacggttttcggattgtaaacttcttttgttaaggacgaagaaagtgacggtacttaacgaataagctc

SEQ ID NO: 7822 - DNA, 490 bp, unidentified
  misc_feature 1..490: note = Ascusbbf_73346, encodes 16S rRNA
  source 1..490: mol_type = genomic DNA
agagtttgatcatggctcaggatgaacgctggcggcgtgcttaacacattcaagtcgtacggacaaaaggacttcggtcctcgagttagtggcggacgggtgagtaacgcgtgagcaatctgccttcgagtgtggaataacagacggaaacggctgctaataccgcataacgtatatttgccgcatgacagatataccaaagatttatcgctcgaagatgagctcgcgtcccattagacagttggtgaggtaacggcccaccaaatctacgatgggtagccggactgagaggtcgaacggccacattggaactgagaaacggtccagactcctacgggaggcagcagtggggaatattgggcaatgggcgaaagcctgacccagcgacgccgcgtgaaggaagaaggtcttcggattgtaaactttagtcgacagggaagaaacaaatgacggtacctgtagaggaagccacgactaactacgtgccagc

SEQ ID NO: 7823 - DNA, 490 bp, unidentified
  misc_feature 1..490: note = Ascusbbf_83395, encodes 16S rRNA
  source 1..490: mol_type = genomic DNA
agagtttgatcatggctcaggatgaacgctggcggcgtgcctaacacatgcaagtcgaacgggcttcatagtgacagagacttcggttgaaggaattatgaagttagtggcggacgggtgagtaacgcgtggagaacctgccctgtacagggggataacacctggaaacaggtgctaaaaccgcataagcgcacggtaccgcatggtacagtgtgaaaaactccggtggtacaggatggctccgcgttggattagccagttggcggggtaacggcccaccaaagcgacgatccatagccggcctgagagggtggacggccacattgggactgagacacggcccagactcctacgggaggcagcagtggggaatattgcacaatggggggaaccctgatgcagcgacgccgcgtgaaggaagaagtatctcggtatgtaaacttctatcagcagggaagaagatgacggtacctgcagaagaagccccggc

SEQ ID NO: 7824 - DNA, 490 bp, unidentified
  misc_feature 1..490: note = Ascusbbf_848570, encodes 16S rRNA
  source 1..490: mol_type = genomic DNA
agatttgatcatggctcaggatgaacgctggcggcgcgcctaacacatgcaagtcgaacgaagcactttaccggatcccttcggggtgaaagttttgtgacttagtggcggacgggtgagtaacgcgtggggaacctgccctgtacagggggataacagttagaaatgactgctaataccgcataagcgcacactgaggcatctcagagtgtgaaaagccgagacggtacaggagggccccgcgtctgattagctggttggtggggtaacggcctaccaaggcgacgatcagtagccgaactgagaggttgatcggccacattgggactgagacacggcccagactcctacgggaggcagcagtgggggattttgcacaatggggggaaccctgatgcagcgacgccgcgtgagtgaagaagtatttcgatacgtaaagctctatcagcagggaagaaaatgacggtacctgactaagaagccccggcta

SEQ ID NO: 7825 - DNA, 490 bp, unidentified
  misc_feature 1..490: note = Ascusbbf_84919, encodes 16S rRNA
  source 1..490: mol_type = genomic DNA
agagtttgatcatggctcaggatgaacgctggcggcgtgcctaatacatgcaagtcgaacgagagtgcttgcactcgagtggcgaacgggtgagtaacacgtaggtaacctgcctcacagtttgggatacccagaggaaactttggctaataccggataattggttggaaggcatcttccgactctaaaaggggcctttaaagcctcgctgagagatggacctgcggcgcattagctagttggtgagataacagcccaccaaggcgaggatgcgtagccgacctgagagggtgaacggccacactggaactgagacacggtccagactcctacgggaggcagcagtagggagttttcggcaatgggggaaaccctgaccgagcaacgccgcgtgagtgatgaaggtcttcggattgtaaagctctgttgtaggggaagaacgatatgatgaggaaatgcttcatatttgacggtaccttattagaaagcc

SEQ ID NO: 7826 - DNA, 490 bp, unidentified
  misc_feature 1..490: note = Ascusbbf_85253, encodes 16S rRNA
  source 1..490: mol_type = genomic DNA
agagtttgatcatggctcaggatgaacgctggcggcgtgcttaacacatgcaagtcgaacgaatttctttcagaacgcggcttcggccaagggacggaagaagtgagtggcggacgggtgagtaacgcgtgggtaacctgcctcacattgggggataccagtcggaaacgactgctaataccgcataagaccacggcaccgcatggtgctgaggccaaaactccggtgatgtgagatggacccgcgtctgattaggcagttggcggggtaacggcccaccaaaccgacgatcagtagccgacctgagagggtgatcggccacattgggactgagacacggcccaaactcctacgggaggcagcagtggggaatattgcacaatgggggaaaccctgatgcagcgacgccgcgtgagtgatgaagtatttcggtacgtaaagctctatcagcaggaacgataatgacggtacctgactaagaagcaccggc

SEQ ID NO: 7827 - DNA, 490 bp, unidentified
  misc_feature 1..490: note = Ascusbbf_258446, encodes 16S rRNA
  source 1..490: mol_type = genomic DNA
agagtttgatcctggctcaggacgaacgctggcggcacgcttaacacatgcaagtcgaacggtgaagtaacttcggttatggatcagtggcggacgggtgagtaacacgtgagcaatctgcctttaagtggggaataacgattggaaacgatcggtaataccgcataatatatcattttcgcatgagagagatatcaaagatttatcgcttaaagatgagctcgcgtctgattagatagttggtgaggtaacggctcaccaagtcgacgatcagtagccggactgagaggttgaacggccacattgggactgagacacggcccagactcctacgggaggcagcagtggggaatattgcacaatggaggaaactctgatgcagcgatgccgcgtgagggaagaaggttttcggattgtaaacctctgttgacagggacgataatgacggtacctgttcagaaagctccggctaactacgtgccagcagccg

SEQ ID NO: 7828 - DNA, 490 bp, unidentified
  misc_feature 1..490: note = Ascusbbf_100836, encodes 16S rRNA
  source 1..490: mol_type = genomic DNA
agagtttgatcatggctcaggatgaacgctggcggcgtgcataacacattcaagtcgaacggagttttgcaggaaagaggcttcggccaatggagagcaagacttagtggcggacgggtgagtaacgcgtgagcaacctgcctatacgagggggacaacagttggaaacgactgctaataccgcataaaatatattaagggcatccttgatatatcaaagagatatcgcgtatagatgggctcgcgtccgattagatagttggtgaggtaacggcccaccaagtcaacgatcggtagccggactgagaggttgaacggccacattggaactgagagacggtccagactcctacgggaggcagcagtggggaatattgggcaatgggcgaaagcctgacccagcgacgccgcgtgagtgaagaaggtcttcggattgtaaagcttagttatcggggaagaaggaagtgacggtacccgaagagaaagccac

SEQ ID NO: 7829 - DNA, 490 bp, unidentified
  misc_feature 1..490: note = Ascusbbf_161416, encodes 16S rRNA
  source 1..490: mol_type = genomic DNA
agagtttgatcatggctcagaacgaacgctggcggcgcgtcttaagcatgcaagtcgaacggcaaggcaggagcttgctcctgccctagagtggcggactggtgagtaacgcgtagatgacgaaccctttggacggggatagccgttagaaataacgggtaataccggatacggtcggttatgttagaggtaaccgaggaaagagagctacggctctgccggaggatcggtctgcgacccatcagctagttggcggggtaaaggcccaccaaggcgatgacgggtatccggcctaagagggtgaacggacacattgggactgagatacggcccagactcctacgggaggcagcagctaagaatattccgcaatgggcgaaagcctgacggagcgacgccgcgtggacgatgaaggccggaaggttgtaaagtcctttagtctgtgaggaataagcggtggagggaatgccactgcggtgactgtagcaga

SEQ ID NO: 7830 - DNA, 490 bp, unidentified
  misc_feature 1..490: note = Ascusbbf_131633, encodes 16S rRNA
  source 1..490: mol_type = genomic DNA
agagtttgatcatggctcaggataaacgctggcggcgcgcataacacatgcaagtcgagcgaggggagtgacttcggtcatgagcctagcggcggacgggtgagtacaatatgaacaacctgccttacagagggggatagccagaagaaattctgattaataccgcatatactgagattgtcacatggtgatttcaggaaagcctgaaggggcgctgtaagaggggtttgtatccgattagctagttggagtggtaacggcacaccaaggcgacgatcggtagctgattcgagaggatagacagccacattgggactgagatacggcccagactcctacgggaggcagcagtggggaatattgcgcaatggagggaactctgacgcagcgacgccgtgtaaaggatgaaggccttcgggttgtaaacttatatcgattatgaaaagataggatggtaataaagtaagaagccccggctaactacgtgcca

SEQ ID NO: 7831 - DNA, 468 bp, unidentified
  misc_feature 1..468: note = Ascusbbf_99843, encodes 16S rRNA
  source 1..468: mol_type = genomic DNA
agagtttgatcctggctcagaacgaacgctggcggcaggcctaacacatgcaagtcggacgctccgcaaggggcgtggcagacgggtgagtaacgcgtgggaacgtacccttcggttcggaataacccagggaaacttgggataataccggatacgtccgcaaggagaaagatttatcgccgaaggatcggcccgcgttggattagctagttggcggggtaatggcccaccaaggcgacgatccatagctggtctgagaggatgatcagccacactgggactgagacacggcccagactcctacgggaggcagcagtggggaatattggacaatgggcgaaagcctgatccagccatgccgcgtgagtgatgacggccttagggttgtaaagctctttcagcggggaagataatgacggtacccgcagaagaagccccggctaacttcgtgccagcagccgcggtaat

SEQ ID NO: 7832 - DNA, 490 bp, unidentified
  misc_feature 1..490: note = Ascusbbf_328725, encodes 16S rRNA
  source 1..490: mol_type = genomic DNA
agagtttgatcatggctcaggacgaacgctggcggcgtgcctaatacatgcaagtcgagcgaatgacgagaagcttgcttctctgatttagcggcggacgggtgagtaacacgtgggcaacctgccctgtagactgggataacttcgggaaaccggagctaataccggataattcttttagcctcatggctttaagctaaaaggcgcttcggcgtcactacaggatgggcccgcggtgcattagctagttggtggggtaacggcctaccaaggcaacgatgcatagccgacctgagagggtgatcggccacattgggactgagacacggcccaaactcctacgggaggcagcagtagggaatcttccacaatggacgaaagtctgatggagcaacgccgcgtgagtgatgaaggttttcggatcgtaaaactctgttgtaagggaagaacaagtgcgttaggtaatgaacgcaccttgacggtaccttat

SEQ ID NO: 7833 - DNA, 490 bp, unidentified
  misc_feature 1..490: note = Ascusbbf_430086, encodes 16S rRNA
  source 1..490: mol_type = genomic DNA
agagtttgatcatggctcagaacgaacgctggcggcaggcctaacacatgcaagtcgagcgtgaaaggggcttcggccctgagtaaagcggcgcacgggtgagtaacacgtgaataatctgccctttggaccgggataacagaccgaaaggactgctaataccggataagcttccgcgccaaccgggcgagtggagaaaaggatgggtctttcgggaccatttaccagaggatgagttcgcgtcccattagatagttggtgaggtaatggctcaccaagtcaacgatgggtagctggtctaagaggatgatcagccacactggaactgagacacggtccagactcctacgggaggcagcagtggggaatcttgcgcaatggaggaaactctgacgcagccatgccgcgtgagtgatgaaggccctcgggttgtaaagctctgtctaaggggaaaaatggcattggatccaacaggtccgatgattgatgg

SEQ ID NO: 7834 - DNA, 490 bp, unidentified
  misc_feature 1..490: note = Ascusbbf_138883, encodes 16S rRNA
  source 1..490: mol_type = genomic DNA
agagtttgatcatggctcagattgaacgctggcggcaggcttaacacatgcaagtcgaacggtaacaggaagaagcttgcttctttgctgacgagtggcggacgggtgagtaatgcttgggaatctggcttatggagggggataactactggaaacggtagctaataccgcgtaatgtctacggactaaagggtgggactttcgggccacctgccataagatgagcccaagtgagattaggtagttggtgaggtaatggctcaccaagccgtcgatctctagctggtctgagaggatgaccagccacactggaactgagacacggtccagactcctacgggaggcagcagtggggaatattgcacaatggggggaaccctgatgcagccatgccgcgtgaatgaagaaggccttcgggttgtaaagttctttcggtagcgaggaaggtggttgttttaatagaacaatcaattgacgttaactacagaag

SEQ ID NO: 7835 - DNA, 490 bp, unidentified
  misc_feature 1..490: note = Ascusbbf_1583374, encodes 16S rRNA
  source 1..490: mol_type = genomic DNA
agagtttgatcctggctcagagcgaacgctggcggcatgcttaacacatgcaagtcgcacgaaggtttcggccttagtggcggacgggtgagtaacgcgtaggtatctatccatgggtgggggataacactgggaaactggtgctaataccgcatgacacctgagggtcaaaggcgcaagtcgcctgtggaggagcctgcgtttgattagctagttggtggggtaaaggcctaccaaggcgatgatcaatagctggtttgagaggatgatcagccacactgggactgagacacggcccagactcctacgggaggcagcagtgaggaatattggtcaatgggcgagagcctgaaccagccaagtagcgtgcaggatgacggccctatgggttgtaaactgcttttgtacgggaataaagtgagggacgtgtccctttttgtatgtaccgtaagaatagggaccggctaattccgtgccagcagccgcggta

SEQ ID NO: 7836 - DNA, 490 bp, unidentified
  misc_feature 1..490: note = Ascusbbf_65824, encodes 16S rRNA
  source 1..490: mol_type = genomic DNA
agagtttgatcatggctcaggatgaacgctggcggcgtgcataacacattcaagtcgaacggacgagggtgcttcggtacccgagttagtggcggacgggtgagtaacgcgtgagcaacctgcccctgtatgtgggataacgtccggaaacggacgctaataccgcatgaatcaacgggaccgcatgattctgttgacaaagatttatcgtacagggatgggctcgcgtccgattagatagttggcggtgcaacggaccaccaagtcaacgatcggtagccggactgagaggttgaacggccacattggaactgagaaacggtccagactcctacgggaggcagcagtggggaatattgggcaatgggcgaaagcctgacccagcgacgccgcgtgaaggaagacggtcttcggattgtaaacttcttttatgtaggacgaagaaatgacggtactacaagaataagccacggctaactacgtgccagca

SEQ ID NO: 7837 - DNA, 490 bp, unidentified
  misc_feature 1..490: note = Ascusbbf_196419, encodes 16S rRNA
  source 1..490: mol_type = genomic DNA
agagtttgatcctggctcaggacgaacgctggcggcgtgcctaatacatgcaagtagaacgctgagcactttagcttgctagagtgtgatgagttgcgaacgggtgagtaacgcgtaggtaacctgcctggtagcgggggataactattggaaacgatagctaataccgcataacagcttttctcgcatgagaggagtttgaaaggtgcaattgcatcactaccagatggacctgcgttgtattagctagttggtgaggtaacggctcaccaaggcgacgatacatagccgacctgagagggtgatcggccacactgggactgagacacggcccagactcctacgggaggcagcagtagggaatcttcggcaatgggggcaaccctgaccgagcaacgccgcgtgagtgaagaaggttttcggatcgtaaagctctgttgtaagtcaagaattctagtgagagtggaaagttcactagttgacggtagct

SEQ ID NO: 7838 - DNA, 490 bp, unidentified
  misc_feature 1..490: note = Ascusbbf_184497, encodes 16S rRNA
  source 1..490: mol_type = genomic DNA
agagtttgatcatggctcaggacgaacgctggcggcgtgcttaacacatgcaagtcgagcggaaaggcccttcggggtactcgagcggcgaacgggtgagtaacacgtgagcaacctgtccttgacttcgggataagcctgggaaaccgggtctaataccggataggacctgccttcgcatgggggtgggtggaaagttttttcggtcaggggtgggctcgcggcctatcagcttgttggtggggtagtggcctaccaaggcttcgacgggtagccggcctgagagggcgaccggccacactgggactgagacacggcccagactcctacgggaggcagcagtggggaatattgcgcaatgggcggaagcctgacgcagcgacgccgcgtgggggatgacggccttcgggttgtaaacctctttcggcagggacgaagttgacgtgtacctgcagaagaagcgccggctaactacgtgccagcagccgcg

SEQ ID NO: 7839 - DNA, 490 bp, unidentified
  misc_feature 1..490: note = Ascusbbf_259603, encodes 16S rRNA
  source 1..490: mol_type = genomic DNA
agagtttgatcatggctcaggatgaacgctagcggcaggcttaacacatgcaagtcgaggggcagcgcggtgtagcaatacactggcggcgaccggcgaaagggtgcgtaacgcgtgaacaatctgcccgtatccgggacataagcgatggaaacgtcgtctaatttcccataacaacaggagccgcatgacttttgtttgaaagatccgtcggatacggatgagttcgcgagacattagctagtcggcgtggtaacggcacaccgaggcgacgatgtctaggggttctgagaggaaggtcccccacactggaactgagacacggtccagactcctacgggaggcagcagtgaggaatattggtcaatgggcgcaagcctgaaccagccatgccgcgtgaaggatgacggccctatgggttgtaaacttcttttgtggtggagcaataagacgtacgcgtacgtcgatgagagtacatcacgaataagca

SEQ ID NO: 7840 - DNA, 490 bp, unidentified
  misc_feature 1..490: note = Ascusbbf_717289, encodes 16S rRNA
  source 1..490: mol_type = genomic DNA
agagtttgatcatggctcagattgaacgctggcggcatgcctaacacatgcaagtcgaacgatgattaagagcttgctcttaagattagtggcggacgggtgagtaatgtatagggatctgcctgttagtgggggacaacagccggaaacggctgctaataccgcatacgctctacggaggaaagtgggggaccctcgggcctcacgctaacagatgaacctatatcagattagctagttggtggggtaagagcctaccaaggcgacgatctgtagctggtttgagagaatgatcagccacactgggactgagacacggcccagactcctacgggaggcagcagtggggaatattggacaatgggcgcaagcctgatccagcaatgccgcgtgtgtgaagaaggccttcgggttgtaaagcactttaagttgggaggaaaagcttggggttaatagccttaagtgttgacgttaccaacagaataagcac

SEQ ID NO: 7841 - DNA, 490 bp, unidentified
  misc_feature 1..490: note = Ascusbbf_266218, encodes 16S rRNA
  source 1..490: mol_type = genomic DNA
agagtttgatcctggctcaggatgaacgctagcggcaggcttaacacatgcaagtcgaggggcagcgcggggtagcaatactctggcggcgaccggcgaaagggtgagtaacgcgtgagcaacgtgcccgtatgtgggggatagtcattagaaatgatgcgtaataccccgtaacacatggatccgcatggttccatgttgaaagatttattgcatacggatcggctcgcgtgccattagctggatggcggggtaacggcccaccatggcgacgatggctaggggttctgagaggaaggtcccccacattggaactgagacacggtccagactcctacgggaggcagcagtgaggaatattggacaatggccggaaggctgatccagccatgccgcgtgcgggaagacggccctatgggttgtaaaccgcttttgcgggggagcaataaggtgcacgcgtgcaccgatgagagtaccctgcgaataagca

SEQ ID NO: 7842 - DNA, 490 bp, unidentified
  misc_feature 1..490: note = Ascusbbf_687180, encodes 16S rRNA
  source 1..490: mol_type = genomic DNA
agagtttgatcatggctcagagcgaacgttagcggcgcgcctaacacatgcaagtcgcacgcgaaagggggcaaccctgagtaaagtggcgcacgggtgcgtaacacgtagataacctgccctttgaagggggataacgttccgaaaggagcgctaataccgcataaggctgcggctgctacggcagcagcagacaaaggctgggaccggcaacggccagccgtcagaggaggggtctgcggcccatcagctagttggtgaggtaatggctcaccaaggcagagacgggtagctggtctgagaggatgatcagccacactggtactggaacacggaccagactcctacgggaggcagcagtggggaatcttggtcaatgggcgcaagcctgaaccagcgacgccgcgtgagtgatgaaggccttcgggttgtaaagctctgtggggagggacgaaagagcttagtcgaataggctaggtgttgacggtac

SEQ ID NO: 7843 - DNA, 490 bp, unidentified
  misc_feature 1..490: note = Ascusbbf_1481854, encodes 16S rRNA
  source 1..490: mol_type = genomic DNA
agagtttgatcatggctcaggatgaacgctggcggcgtgcttaacacatgcaagtcgaacggagattactttttagcttgctattttgtaatctcagtggcggacgggtgagtaacgcgtgggtaacctgccttatccagggggataacagtgagaaattactgctaataccgcataagcgcacagtttcgcatgaaacagtgtgaaaagatttatcgggataagatggacccgcgtctgattagctagttggtgaggtaacagcccaccaaggcgacgatcagtagccggcctgagagggtgaacggccacattgggactgagacacggcccaaactcctacgggaggcagcagtggggaatattgcacaatgggggaaaccctgatgcagcgacgccgcgtgagtgaagaagtatttcggtatgtaaagctctatcagcagggaagaaaatgacggtacctgactaagaagccccggctaactacgtg

SEQ ID NO: 7844 - DNA, 490 bp, unidentified
  misc_feature 1..490: note = Ascusbbf_1096326, encodes 16S rRNA
  source 1..490: mol_type = genomic DNA
agagtttgatcatggctcaggatgaacgccggcggtgtgcctaatacatgcaagtcgaacgcactggcccaactgagatgacgtgcttgcactgatttgacgatggattaccagtgagtggcggacgggtgagtaacacgtaggcaacctgcccaagagcgggggataacatttggaaacaagtgctaataccgcataagattgatgaccacatggtcatcaatttaaagatggtttcggctatcactcttggatgggcctgcggtgcattagctagttggtaaggtaacggcttaccaaggcagtgatgcatagccgagttgagagactgatcggccacaatgggactgagacacggcccatactcctacgggaggcagcagtagggaatcttccacaatgggcgcaagcctgatggagcgacaccgcgtgagtgaagaagggtttcggctcgtaaagctctgttgttgaagaagaacgtgcgtgagag

SEQ ID NO: 7845 - DNA, 490 bp, unidentified
  misc_feature 1..490: note = Ascusbbf_165271, encodes 16S rRNA
  source 1..490: mol_type = genomic DNA
agagtttgatcctggctcaggacgaacgctggcggcatgcctaacacatgcaagtcgaacggagttatttggattcgtctggataacttagtggcggacgggtgagtaacacgtgagcaacctgcccttcagagggggacaacagttggaaacgactgctaataccgcataacatatacttaaggcatcttgagtatatcaaagatttatcgctgagggatgggctcgcgtctgattagatagttggtgaggtaacggcccaccaagtctacgatcagtagccggactgagaggttgaacggccacattgggactgagatacggcccagactcctacgggaggcagcagtggggaatattggtcaatgggggcaaccctgaaccagcaatgccgcgtgaaggaagaaggccttcgggttgtaaacttctttgaccagggacgataatgacggtacctggaaaacaagccacggctaactacgtgccagca

SEQ ID NO: 7846 - DNA, 490 bp, unidentified
  misc_feature 1..490: note = Ascusbbf_204929, encodes 16S rRNA
  source 1..490: mol_type = genomic DNA
agagtttgatcatggctcagaacgaacgctggcggcgcgtcttaagcatgcaagtcgaacgggattcaggggcttgcccctgatgagagtggcggactggtgagtaacacgtaggtgacatgccttttggttggggatagcctgtggaaacacagggtaataccgaataagaccgcggattctgatccgcggtgaaaggagctccggctccgccgatagattggcctgcggcccatcagctagtaggtgaggtaaaggcccacctaggcaatgacgggtatccggcctgagagggtgatcggacacattgggactgagatacggcccagactcctacgggaggcagcagctaagaatattccgcaatgggcgaaagcctgacggagcgacgccgcgtggatgatgaaggccgtgaggttgtaaaatccttttgtgagtgaggaataaacgccgcagggaatggcggcgcggtgactgtagctcacgaata

SEQ ID NO: 7847 - DNA, 490 bp, unidentified
  misc_feature 1..490: note = Ascusbbf_1760007, encodes 16S rRNA
  source 1..490: mol_type = genomic DNA
agagtttgatcctggctcaggatgaacgctggcggcgtgcctaacacattcaagtcgaacggagaagtcccttcggggacggatcagtggcggacgggtgagtaacgcgtgagcaacctgccgtatagtgggggataacacagggaaacctgtgctaataccgcatgacacattgagaccgcatggtcatgatgtcaaggagaaattgctgtacgatgggctcgcgtatggttagacagttggcggggtaacggcccaccaaatcgacgatcattagccgaactgagaggttgaacggccacattggaactgagagacggtccagactcctacgggaggcagcagtggggaatattgggcaatgggcgaaagcctgacccagcgacgccgcgtgaggaaagaaggtcttcggattgtaaacctctttcagcagggaagaaggaagtgacggtacctgcagaagaagtcacggctaaccacgtgccagcag

SEQ ID NO: 7848 - DNA, 490 bp, unidentified
  misc_feature 1..490: note = Ascusbbf_126716, encodes 16S rRNA
  source 1..490: mol_type = genomic DNA
agagtttgatcatggctcaggatgaacgctggcggcgtgcttaacacatgcaagtcgaacgagcggaggaccttcgggtccgaagcgagtggcggacgggtgagtaacgcgtgggtaacctgccttataccgggggataacagatggaaacgactgttaataccgcataagcccacagtgccgcatggtacagtgagaaaagttccggcgatataagatggacccgcgtctgattagttagttggtggggtaacggcctaccaagacgacgatcagtagccgacctgagagggtgatcggccacattgggactgagacacggcccaaactcctacgggaggcagcagtggggaatattgggcaatgggcgcaagcctgacccagcgacgccgcgtgagtgaagaagtatttcggtatgtaaagctctatcagcagggaagatcatgacggtacctgactaagaagcaccggctaaatacgtgccagcagc

SEQ ID NO: 7849 - DNA, 490 bp, unidentified
  misc_feature 1..490: note = Ascusbbf_138636, encodes 16S rRNA
  source 1..490: mol_type = genomic DNA
agagtttgatcatggctcaggatgaacgctggcggcgtgcctaacacatgcaagtcgaacgggaactccaagatgagacttcggtggatttttggaaattctagtggcggacgggtgagtaacgcgtgggtaacctgcccttaagaggagaataacagtgagaaatcactgctaatacaccataagaaattttgtcgcatgacaagatttggaaagatttatcgcttaaggatggacccgcgtttgattagccagttggtagggtaacggcctaccaaagcaacgatcaatagccggcctgagagggtgaacggccacattggaactgagacacggtccaaactcctacgggaggcagcagtggggagtattgcacaatgggcgaaagcctgatgcagcaacgccgcgtgagtgaagaagtatttcggtatgtaaagctctatcgatggggaataaaatgaaggtacccaagtaagaagccccggctaac

SEQ ID NO: 7850 - DNA, 490 bp, unidentified
  misc_feature 1..490: note = Ascusbbf_141906, encodes 16S rRNA
  source 1..490: mol_type = genomic DNA
agagtttgatcctggctcaggatgaacgctagcggcaggcctaatacatgcaagtcgaacggcatcgcgggtagcaatacctggcggcgagtggcggatgggtgcgtaacacgtatgcaacctacccattactgggaaatagctcgaagaaattcgaattaatgtcccataatatcttttagtggcatcacttttagattaaagatttatcggtaatggatgggcatgcgtttgattagctagttggtgaggtaatggctcaccaaggctacgatcaatagggggtctgagaggatggtcccccacactggtactgagatacggaccagactcctacgggaggcagcagtagggaatattgggcaatggaggcaactctgacccagccatgccgcgtgaaggatgaaggcgttctgcgttgtaaacttcttttatatgggaagaaacgactcttgcgagaggcattgacggtaccatatgaataagcacc

SEQ ID NO: 7851 - DNA, 490 bp, unidentified
  misc_feature 1..490: note = Ascusbbf_154120, encodes 16S rRNA
  source 1..490: mol_type = genomic DNA
agagtttgatcatggctcaggacgaacgctggcggcgtgcctaacacatgcaagtcgaacgaagcactcggagcttgctttgagtgacttagtggcggacgggtgagtaatgcgtgagcaacctgccctgaagagggggacaacagttggaaacgactgctaataccgcataacgtatccggagggcatcctctggataccaaagatttatcgcttcaggatgggctcacgtctgattagctagttggtgaggtaacggcccaccaaggctgcgatcagtagccggactgagaggttgaacggccacattgggactgagatacggcccagactcctacgggaggcagcagtggggaatattaggcaatgggggcaaccctgacctagcaacgccgcgtgaaggaagaaggccttcgggttgtaaacttcttttatgagggacgaaggacgtgacggtacctcatgaataagccacggctaactacgtgcc

SEQ ID NO: 7852 - DNA, 490 bp, unidentified
  misc_feature 1..490: note = Ascusbbf_383091, encodes 16S rRNA
  source 1..490: mol_type = genomic DNA
agagtttgatcatggctcaggatgaacgctagcggcaggcttaacacatgcaagtcgaggggcagcgtgggggtagcaatactcccgacggcgaccggcgcacgggtgagtaacgcgtatgcaacctttcccagacagggggatagcccagggaaacttggattaataccccgtaggccgtggggcggcatcgccctatggttaaagttccggcggtctggggtgggcatgcgtgccattaggcagttggtggggtaacggcccaccaaaccgacgatggctacggggtctaaaaggatggtcccgcacattggaactgagacacggtccaaactcctacgggaggcagcagtgaggaatattggtcaatggggggaaccctgaaccagccatgccgcgtggaggaagacggccctacgggttgtaaactcctttagcacgggaataaactcagtcacgtgtgactgattgaaggtaccgtgagaataag

SEQ ID NO: 7853 - DNA, 490 bp, unidentified
  misc_feature 1..490: note = Ascusbbf_708741, encodes 16S rRNA
  source 1..490: mol_type = genomic DNA
agagtttgatccgggctcaggatgaacgctggcggcgtgcataacacattcaagtcgaacggtgaagttccttcgggaacggagcagtggcggacgggtgagtaacgcgtgagcaacctgccgtatagtgggggataacacagggaaacttgtgctaataccgcataacacattgaggtcgcatggctttgatgtcaaagatttattgctgtacgatgggctcgcgtatgattagacagttggtagggtaacggcctaccaaatcaacgatcattagccgaactgagaggttgaacggccacattggaactgagaaacggtccagactcctacgggaggcagcagtggggaatattgggcaatgggcgaaagcctgacccagcgacgccgcgtgagggaagaaggtcttcggattgtaaacctctttcagcagggaagaaggaagtgacggtacctgcagaagaagtcacggctaactacgtgccagcag

SEQ ID NO: 7854 - DNA, 490 bp, unidentified
  misc_feature 1..490: note = Ascusbbf_381162, encodes 16S rRNA
  source 1..490: mol_type = genomic DNA
agagtttgatcatggctcaggacgaacgctggcggcgtgcctaatacatgcaagtcgagcgaacagataaggagcttgctcctttgacgttagcggcggacgggtgagtaacacgtgggtaacctgccctatagtttgggataactccgggaaaccggggctaataccgaataagtgatttcttcgcatgaagtgaatctggaaagacggtttcggctgtcgctataggatggacccgcggcgcattagctagttggtgaggtaacggctcaccaaggcaacgatgcgtagccgacctgagagggtgatcggccacactgggactgagacacggcccagactcctacgggaggcagcagtagggaatcttccacaatggacgaaagtctgatggagcaacgccgcgtgagtgaagaaggatttcggttcgtaaaactctgttgcaagggaagaacaagtagcgtagtaactggcgctaccttgacggtac

SEQ ID NO: 7855 - DNA, 490 bp, unidentified
  misc_feature 1..490: note = Ascusbbf_174095, encodes 16S rRNA
  source 1..490: mol_type = genomic DNA
agagtttgatcatggctcagattgaacgctggcggcatgccttacacatgcaagtcgaacggcagcataggagcttgctcctgatggcgagtggcgaacgggtgagtaatatatcggaacgtgccctagagtgggggataactagtcgaaagattagctaataccgcatacgatctacggatgaaagtgggggatcgcaagacctcatgctcttggagtggccgatatctgattagctagttggtggggtaaaagctcaccaaggcgacgatcagtagctggtctgagaggacgaccagccacactggaactgagacacggtccagactcctacgggaggcagcagtggggaattttggacaatgggggcaaccctgatccagcaatgccgcgtgagtgaagaaggccttcgggttgtaaagctcttttgtcagggaagaaacggtgagggctaatatcccttgctaatgacggtacctgaagaataagc

SEQ ID NO: 7856 - DNA, 490 bp, unidentified
  misc_feature 1..490: note = Ascusbbf_220713, encodes 16S rRNA
  source 1..490: mol_type = genomic DNA
agagtttgatcctggctcaggatgaacgctggcggcgtgcctaatacatgcaagtcgaacggggtggatgggagcttgctccttgatacctagtggcgaacgggtgagtaacacgtaggtaacctgcctttcagtttgggatacccagaggaaactttggctaataccggataactaatttggaggcatctccaaattctaaaaggggctctcaagcctcgctgattgatggacctgcggcgcattagctagttggtgagataatagcccaccaaggcgaggatgcgtagccgacctgagagggtgaacggccacactggaactgagacacggtccagactcctacgggaggcagcagtagggagttttcggcaatgggcgaaagcctgaccgagcaacgccgcgtgagtgatgaaggtcttcggattgtaaaactctgttgtaagggaagaacggtacggtgaggaaatgctccgtatttgacggtacc

SEQ ID NO: 7857 - DNA, 490 bp, unidentified
  misc_feature 1..490: note = Ascusbbf_447666, encodes 16S rRNA
  source 1..490: mol_type = genomic DNA
agagtttgatcatggctcaggatgaacgctagcggcaggcttaacacatgcaagtcgaggggcagcgcgggtagcaatacctggcggcgaccggcgaaagggtgagtaacgcgtgagcaacgtgcccgtggttgggggatagtcattagaaatgatgcgtaataccccgtaacataaggagtcgcatgactttttattgaaagatttattgaccacggatcggctcgcgtaccattagctagatggcggggtaacggcccaccatggcgacgatggttaggggttctgagaggaaggtcccccacattggaactgagacacggtccagactcctacgggaggcagcagtgaggaatattggacaatggccggaaggctgatccagccatgccgcgtgcgggaggacggccctatgggttgtaaaccgcttttgcgagggagcaataaggtctacgtgtagaccgatgagagtaccttacgaataagcatc

SEQ ID NO: 7858 - DNA, 490 bp, unidentified
  misc_feature 1..490: note = Ascusbbf_445601, encodes 16S rRNA
  source 1..490: mol_type = genomic DNA
agagtttgatcatggctcaggatgaacgctagcgacaggcctaacacatgcaagtcgaggggcagcgagaggtagcaatactttgtcggcgaccggcgcacgggtgagtaacgcgtatgcaacctggctacggctacgggatagccttgcgaaagtaagattaataccgtatgcgacgtttggggacatccccggatgttgaaagatttatcggcagtagatgggcatgcgtctgattaggtagttggcggggtaacggcccaccaagccgacgatcagtaggggttctgagaggaaggtcccccacattggaactgagacacggtccaaactcctacgggaggcagcagtgaggaatattggtcaatggacggaagtttgaaccagccaagtcgcgtgaaggaagacggttctatggattgtaaacttcttttgctcgagggtaaaggtcggtacgtgtaccgatttgcaagtatcgagtgaataagca

SEQ ID NO: 7859 - DNA, 490 bp, unidentified
  misc_feature 1..490: note = Ascusbbf_1222797, encodes 16S rRNA
  source 1..490: mol_type = genomic DNA
agagtttgatcatggctcaggatgaacgctggcggcgtgcttaacacatgcaagtcgaacggaggacccatgacggagttttcggacaacagaatggaatccttagtggcggacgggtgagtaacgcgtgaggaacctgccttggagaggggaataacacagagaaatttgtgctaataccgcatgatacaattctatcgcatggtagtgattgtcaaagattttatcgctctgagatggcctcgcgtctgattagcttgttggcggggtaacggcccaccaaggcgacgatcagtagccggactgagaggttggccggccacattgggactgagacacggcccagactcctacgggaggcagcagtggggaatattgggcaatgggcgcaagcctgacccagcaacgccgcgtgaaggaagaaggctttcgggttgtaaacttcttttatgagggacgaaacaaatgacggtacctcatgaataagctc

SEQ ID NO: 7860 - DNA, 490 bp, unidentified
  misc_feature 1..490: note = Ascusbbf_185918, encodes 16S rRNA
  source 1..490: mol_type = genomic DNA
agagtttgatcatggctcaggacgaacgctggcggcgtgcttaaaacatgcaagtcgaacggacgagggtgagtacttgtacgaacccaagttagtggcggacgggtgagtaacgcgtgagcaatctgcctatcacagggggataacaactggaaacgggtgctaataccgcatatgaccacaacccgacatcgggaaggggtgaaaggagcgatccggtgatagatgagcttgcgtctcattagctagttggtgaggtaacggcccaccaaggcgacgatgagtagccgatctgagaggatgaacggccacattggaactgagagacggtccaaactcctacgggaggcagcagttaggaatattgggcaatggaggaaactctgacccagcaacgccgcgtgaaggaagaaggttttcggattgtaaacttctgatctgtggaaaaaagagagtgatggtaccacaggagcaagccacggctaactac

SEQ ID NO: 7861 - DNA, 490 bp, unidentified
  misc_feature 1..490: note = Ascusbbf_445691, encodes 16S rRNA
  source 1..490: mol_type = genomic DNA
agagtttgatcatggctcagattgaacgctggcggcatgcctaacacatgcaagtcgaacgatgatttccagcttgctggaatgattagtggcggacgggtgagtaatgtatagggatctgcctgttagtgggggacaacagccggaaacggctgctaataccgcatacgctctacggaggaaagtgggggaccttcgggcctcacgctaacagatgaacctatatcagattagctagttggtggggtaagggcctaccaaggcgacgatctgtagctggtttgagagaatgatcagccacactgggactgagacacggcccagactcctacgggaggcagcagtggggaatattggacaatgggggcaaccctgatccagcaatgccgcgtgtgtgaagaaggccttcgggttgtaaagcactttaagttgggaggaaaagcttgttgttaatagcgataagtgttgacgttaccaacagaataagcac

SEQ ID NO: 7862 - DNA, 490 bp, unidentified
  misc_feature 1..490: note = Ascusbbf_1877186, encodes 16S rRNA
  source 1..490: mol_type = genomic DNA
agagtttgatcatggctcaggatgaacgctggcggcatgcctaagacatgcaagtcgtacgaggttgcctgttgaaatttactgcttgcagcaaatggatatagatcacaacctagtggcgaaagggtgagtaacacgtgagttatctacctcagagactgggataactactggaaacggtagctaataccggatgatatatggaacgatacgttgttctatagtaaaaggtgcctttaaagcatcactttgagatgagcttgcgacgtattagctagttggtgaggtaatggcttaccaaggcgaagatgcgtagccgacctgagagggtgatcggccacactgggactgagacacggcccagactcctacgggagacagcagttagggatattcgtcaatgggggaaaccctgaacgagcaatgccgcgtgagtgatgacagttctatggattgtaaaactctgttgttagggacgaacgacctatat

SEQ ID NO: 7863 - DNA, 490 bp, unidentified
  misc_feature 1..490: note = Ascusbbf_432303, encodes 16S rRNA
  source 1..490: mol_type = genomic DNA
agagtttgatcctggctcaggacgaacgctggcggcgtgcttaacacatgcaagtcgaacgagaatctatggaaagaggtttcgaccgatggaagtagaggaaagtggcggactggtgagtaacgcgtgagtaacctgcccttcagagggggacaacagttggaaacggctgctaataccgcatgatgcacgtttgtcgcatggcagacgtgtcaaagatttatcgctgaaggatgggctcgcgtctgattagctagttggtggggtaaaggctcaccaaggcgacgatcagtagccggactgagaggttgaccggccacattgggactgagatacggcccagactcctacgggaggcagcagtggggaatattgggcaatggacgaaagtctgacccagcaacgccgcgtgaaggaagaaggtcttcggattgtaaacttctttgacaggggaagagtggaagacggtaccctgaaaacaagccacggc

SEQ ID NO: 7864 - DNA, 490 bp, unidentified
  misc_feature 1..490: note = Ascusbbf_1839971, encodes 16S rRNA
  source 1..490: mol_type = genomic DNA
agagtttgatcatggctcagaacgaacgctggcggcgcgtcttaagcatgcaagtcgggcgggattacggtgcttgcaccgtatgagagcggcggactggtgagtaacgcgtgggtgacgtacccccgtgaaggggatagctcctagaaataggaggtaataccggataatctgcagtgtgtcagaggcactgcaggaaaggagcttttgctccgcacggggagcggcccgcgtactattagctggttagtgaggtaacggcccaccaaggcgatgatagttacccggcctaagagggtggacgggcacattgggactgagatacggcccagactcctacgggaggcagcagctaagaatattccgcaatgggggaaaccctgacggagcgacgccgcgtggatgaagaaggccggaaggttgtaaaatccttttatgactgatgaataaggagtgtgagagaaacgcattctgatgacggtaggtcatg

SEQ ID NO: 7865 - DNA, 490 bp, unidentified
  misc_feature 1..490: note = Ascusbbf_486713, encodes 16S rRNA
  source 1..490: mol_type = genomic DNA
agagtttgatcctggctcagaacgaacgccggcggcgcgtcttaagcatgcaagtcgggcgggattccagtgcttgcactggatgagagcggcggactggtgagtagcgcgtgggcgacgcgccccctgcaccgggacagccggcagaaatgccgggtgatacgggatgagctcccgccttgtggcgaggcgggaggaaagcggccacggccgcggcaggggagcggcccgcgtcccatcagctagtaggcggggcaagggcccacctaggctacgacgggtacccggactgagaggttggacgggcacattgggactgagatacggcccagactcctacgggaggcagcagctaagaatattccgcaatgggggaaaccctgacggagcgacgccgcgtggacgatggaggccggaaggttgtaaagtcctctggcgcccgaggaatttccgctgcagggaatggcagcggagtgactgtagggcgaga

SEQ ID NO: 7866 - DNA, 490 bp, unidentified
  misc_feature 1..490: note = Ascusbbf_283459, encodes 16S rRNA
  source 1..490: mol_type = genomic DNA
agagtttgatcatggctcagaatgaacgttggcggcgtggattaggcatgcaagtcggacgcccctcgggggcgtggcgaaagggtgagtaaggcgacggcaaccaaccccgcggagggggacagccgggggaaacctcgggtaatcccccatgacgcctcggtgggggcatccccatcaggccaaaggtgcgagcccgccgcgggacgggccgttgtggtatcagctggatggtggggtcacggcccaccatggcgatgacgcctaccgggcgtgcgagcgtggcccggcacactgggactgagacactgcccagacacctacgggtggctgcagtcgagaatcttcggcaatgggcgacagcctgaccgagcgacgccgcgtggaggatgaaggccttcgggttgtaaactcctgtcgagggggaacaaggggcggtgaagagccgtccttgagtgatccctggaggaagcacgggctaagttcgtgc

SEQ ID NO: 7867 - DNA, 490 bp, unidentified
  misc_feature 1..490: note = Ascusbbf_284551, encodes 16S rRNA
  source 1..490: mol_type = genomic DNA
agagtttgatcatggctcagaacgaacgctggcggcgcgcttaacacatgcaagtcgagcggtctgtagcaatacaggcagcggcgaacgggtgagtaacacgtgggtaatctgccctcgagtccgggataactcggcgaaagccgagctaataccggatgagctcacggtgcggcatcgcacagtgggaaaagtggcaacacgctcaaggatgagcccgcggcccatcagctagttggcggggtaatggcccaccaaggctacgacgggtagctggtctgagaggacgaccagtcacactggaactgagacacggtccagactcctacgggaggcagcagtggggaatcttgcgcaatgggcgaaagcctgacgcagcgacgccgcgtgtgcgatgaaggcccttgggtcgtaaagcactgtcgcgagggaagaaacctgacggtacctcgagaggaagcaccggctaactctgtgccagcagccgcgg

SEQ ID NO: 7868 - DNA, 490 bp, unidentified
  misc_feature 1..490: note = Ascusbbf_719555, encodes 16S rRNA
  source 1..490: mol_type = genomic DNA
agagtttgatcatggctcagaatgaacgctggcggcatggattaggcatgcaagtcgaacgagaaagcgccctcgggcgcgagtaaagtggcggaagggtgagtagcacgtggggaacctgccccggggaccggaacaagcctgtgaaaacgggtctgaaaccggatggcgccccggcccgcatgggccggaggcgaaaaattcattgccccgggatggccccgcggcccattagctagttggcggggtagaggcccaccaaggccgcgacgggtaggtggtctgagaggatggtcacccacactgggactgagacactgcccagactcctgcgggaggctgcagtcgagaatcttccgcaatgggcgcaagcctgacggagcgatgccgcgtgagggaagtaggccttcgggtcgtgaacctctgtcggcggggacgaagcaagcgacggtacccgccaaggaagccacggctaaccacgtgccagcag

SEQ ID NO: 7869 - DNA, 490 bp, unidentified
  misc_feature 1..490: note = Ascusbbf_1814089, encodes 16S rRNA
  source 1..490: mol_type = genomic DNA
agagtttgatcctggctcagaacgaacgctggcggcgcgtcttaagcatgcaagtcggacggcaggttgccttcgggcagccgagagtggcgaacgggtgagtaacacgtaagtgatctgccccgcagttggggatagcctgtggaaacacagggtaataccggatgagatgtcaatgactgaactatgacatgaaagtggctacggccacgctgggggacgagcttgcggctcattagctagttgggggtgtaacggaccaccaaggcgacgatgagtagccggcctgagagggtgaacggccacattgggactgagacacggcccagactcctgcgggaggcagcagctaagaatattccgcaatgggggaaaccctgacggagcgacgccgcgtgaacgatgaaggcagagatgttgtaaagttcttttatcactggagaataaggagggcagggaatggccctctgatgacgtcaggtgatgaata

SEQ ID NO: 7870 - DNA, 490 bp, unidentified
  misc_feature 1..490: note = Ascusbbf_1815872, encodes 16S rRNA
  source 1..490: mol_type = genomic DNA
agagtttgatcctggctcaggatgaacgctagcggcaggcctaatacatgcaagtcgaacgggaggcgcccttcggggcgccgagagtggcggacgggtgcgcaacgcgtatgcaaccatcccccgacgggcgcacagccggtggaaacgccgggtaatgcgccatgcggccttacgggggcatccccgggaggcgaaagctccggcggtcggggacgggcatgcgtgccattagatagtcggcggggtgacggcccaccgagtcgacgatggctaggggatctgagaggacggtcccccacactggtactgagacacggaccagactcctgcgggaggcagcagtaagggatattgggcaatgggcgggagcctgacccagccatgccgcgtgagggaatgaggccctacgggtcgtgaacctcttttgttcggggacaacgactcccacgggatgggaggctgagggtaccgaaggaataagcgccgg

SEQ ID NO: 7871 - DNA, 490 bp, unidentified
  misc_feature 1..490: note = Ascusbbf_329536, encodes 16S rRNA
  source 1..490: mol_type = genomic DNA
agagtttgatcctggctcaggatgaacgctagcggcaggcttaacacatgcaagtcgaggggcatcgcggggtagcaatactctggcggcgaccggcgaaagggtgagtaacgcgtgagcaacatacccgggagagggggatagtcattggaaacgatgcgtaataccccgtaacatatggtatcgcatggtattatattgagagatttattgattccggattggctcgcgtgccattaggtagttggcggggtaacggcccaccaagccgacgatggctaggggttctgagaggaaggtcccccacattggaactgagacacggtccagactcctacgggaggcagcagtgaggaatattggacaatggaaggaattctgatccagccatgccgcgtgcgggaggacggccctatgggttgtaaaccgcttttttgtgggagcaataaggtctacgagtagactgatgagagtaccatgagaataagca

SEQ ID NO: 7872 - DNA, 490 bp, unidentified
  misc_feature 1..490: note = Ascusbbf_209343, encodes 16S rRNA
  source 1..490: mol_type = genomic DNA
agagtttgatcctggctcaggatgaacgctagcggcaggcttaacacatgcaagtcgaggggcagcgagggtagcaatacctgtcggcgaccggcggaagggtgcgtaacgcgtgagcaacatgcccgcggccgggggataagcattggaaacgatgtctaataccccatacgatgcgaggaggcatctccttgttttgaaagatttatcggcagcggattggttcgcgtgacattagctagtcggcggggtaacggcccaccgaggcgacgatgtctaggggttctgagaggaaggtcccccacactggaactgagacacggtccagactcctacgggaggcagcagtgaggaatattggtcaatgggcggaagcctgaaccagccatgccgcgtgaaggaataaggccctatgggtcgtaaacttcttttgacgcagagcaataagggtcacgtgtggtccgatgagagtatgcgtcgaataagcatc

SEQ ID NO: 7873 - DNA, 490 bp, unidentified
  misc_feature 1..490: note = Ascusbbf_1788486, encodes 16S rRNA
  source 1..490: mol_type = genomic DNA
agagtttgatcatggctcagattgaacgctggcggcaggcctaacacatgcaagtcgagcgcgaaagttcttcggaatgagtaaagcggcggacgggtgagtaacgcgtgggaatctgcctggtagtgggggacaacgttcggaaacgaacgctaataccgcatacgccctacgggggaaggggggggatcttcggacctctcgctatcagatgagcccgcgtcggattagcttgttggtggggtaaaggcctaccaaggcgacgatccgtaactggtctgagaggatgatcagtcacactggaactgagacacggtccagactcctacgggaggcagcagtggggaatattggacaatgggggcaaccctgatccagccatgccgcgtgtgtgaagaaggccttagggttgtaaggcactttcagtggggagaaaggttgtttacttaatacgtaagcaaattgatgttacccacagaagaagcaccgg

SEQ ID NO: 7874 - DNA, 490 bp, unidentified
  misc_feature 1..490: note = Ascusbbf_332990, encodes 16S rRNA
  source 1..490: mol_type = genomic DNA
agagtttgatcctggctcaggatgaacgctggcggcgtgcttaacacatgcaagtcgaacggagtattgacgctgacgagtggagagcttgctcgaagcaaatcttgtcgatacttagtggcggacgggtgagtaacgcgtgggtaacctgccgtatgcagggggacaacagttggaaacgactgctaataccgcatatgcacacagtaaggcatcttacagggtggaaagaatttcggcatacgatggacccgcgtctgattagctagttggtgaggtaacggcccaccaaggcgacgatcagtagccggcctgagagggtgaacggccacattgggactgagacacggcccaaactcctacgggaggcagcagtggggaatattgcacaatgggggaaaccctgatgcagcgacgccgcgtgagtgaagaagtatttcggtatgtaaagctctatcagcagggaagaaaatgacggtacctgactaag

SEQ ID NO: 7875 - DNA, 490 bp, unidentified
  misc_feature 1..490: note = Ascusbbf_1880040, encodes 16S rRNA
  source 1..490: mol_type = genomic DNA
agagtttgatcctggctcaggacgaacgctggcggcgtgcttaacacatgcaagtcgaacgaggaacggatggaagcttgcttttatccgtttcgagtggcggacgggtgagtaacgcgtgaggtacctggcttttgcagggggatagcgtttcgaaagagacggtaataccgcatgagaccacagcaccgcatggtaaaggggtcaaaggagagatccggcagaagatggactcgcgtcccattaggcagttggcggggtaaaggcccaccaaaccgacgatgggtagccgacctgagagggtgatcggccacattggaactgagagacggtccaaactcctacgggaggcagcagtggggaatattgggcaatgggcgaaagcctgacccagcaacgccgcgtgagggaagaaggttttcggattgtaaacctctgtcccaggagacgagaaggagacggtatcctgggaggaagccccggctaacta

SEQ ID NO: 7876 - DNA, 490 bp, unidentified
  misc_feature 1..490: note = Ascusbbf_1568751, encodes 16S rRNA
  source 1..490: mol_type = genomic DNA
agagtttgatcctggctcaggatgaacgctggcggcgtgcttaacacatgcaagtcgaacgaagcacttgagatgagaccttcgggtggattttcttgtgacttagtggcggacgggtgagtaacgcgtgggtaacctgccccatacagggggataacagttggaaacgactgctaagaccgcataacaagggagtaccgcatgacacttccttcaaagatttatcggtatgggatgggcccgcgtctgattagccagttggtgaggtaatggcccaccaaagcaacgatcagtagccggcttgagagagtgaacggccacattgggactgagacacggcccaaactcctacgggaggcagcagtgggggatattggacaatgggggaaaccctgatccagcgacgccgcgtgagtgaagaagtatttcggtatgtaaagctctatcagcagggaagaaaaagcgcaagcattgacagtacctgactaag

SEQ ID NO: 7877 - DNA, 490 bp, unidentified
  misc_feature 1..490: note = Ascusbbf_466081, encodes 16S rRNA
  source 1..490: mol_type = genomic DNA
agagtttgatcatggctcaggatgaacgctggcggcgtgcttaacacattcaagtcgaacggtgaagggggcttcggttcccggatcagtggcggacgggtgagtaacgcgtgaataacctgcctgtgtgtgggggataacagctggaaacggctgctaataccgcataacgtacggacaccgcatgatgaccgtaccaaagatttattgcgcacagatggattcgcgtccgattagatagttggtgaggtaacggcccaccaagtcgacgatcggtagccggactgagaggtcgaacggccacattggaactgagacacggtccagactcctacgggaggcagcagtggggaatattgggcaatggacgaaagtctgacccagcgacgccgcgtgagggaagaagatcttcggattgtaaaccttagtcaacagggaagaagaaagtgacggtacctgtggaggaagccacggctaactacgtgccagc

SEQ ID NO: 7878 - DNA, 490 bp, unidentified
  misc_feature 1..490: note = Ascusbbf_713419, encodes 16S rRNA
  source 1..490: mol_type = genomic DNA
agagtttgatcctggctcaggatgaacgctggcggcgtgcctaatacatgcaagtcgatcgctggagacttagcttgctaagtcaaaggagaggcgaacgggtgagtaatacataagcaacctgcccacgaagactgggataattcctggaaacggggactaataccggataggcagtcatatcgcatgatgagactgttaaaggttcaaaacactggtggatgggcttatggcgcattagttagttggtgaggtaacggcccaccaagacgatgatgcgtagccggcctgagagggtgaacggccacattgggactgagacacggcccagactcctacgggaggcagcagtagggaattttcggcaatgggggaaaccctgaccgagcaacgccgcgtgagtgatgacggccttcgggttgtaaagctctgttgtaagggaagaacggtacggagagaatctgtaaatgacggtaccttaccagaaagc

SEQ ID NO: 7879 - DNA, 490 bp, unidentified
  misc_feature 1..490: note = Ascusbbf_879621, encodes 16S rRNA
  source 1..490: mol_type = genomic DNA
agagtttgatcctggctcaggatgaacgctggcggcgtgcctaacacatgcaagtcgaacgaagcatcttgcccgaggaagaggagtgcttgcacgaatccaactcaactgagatgacttagtggcggacgggtgagtaacgcgtgggtaacctgccctatacagggggataacagttagaaatgactgctaataccgcataagcgcacagcatcgcatggtgcagtgtgaaaagccgagacggtataggatggacccgcgtctgattagccagttggcagggtaacggcctaccaaagcaacgatcagtagccggcctgagagggtgaacggccacattgggactgagacacggcccaaactcctacgggaggcagcagtgggggatattgcacaatgggggaaaccctgatgcagcgacgccgcgtgagtgaagaagtatttcggtatgtaaagctctatcagcagggaagaaaatgacggtacctga

SEQ ID NO: 7880 - DNA, 490 bp, unidentified
  misc_feature 1..490: note = Ascusbbf_1724722, encodes 16S rRNA
  source 1..490: mol_type = genomic DNA
agagtttgatcctggctcaggacgaacgctggcggcgtgcttaacacatgcaagtcgaacgaggtttccggagagcttgctcgaagggaaccgagtggcggacgggtgagtaacgcgtgagcaacctgtctcacacagggggataacgcatcgaaagatgtgctaataccgcgtaggaccacggtgtcgcatggcactgaggtgaaaggagaaatccggtgtgaggtgggctcgcgtctgattagatagttggtgaggtaacggctcaccaagtcaacgatcagtagccgacctgagagggtgatcggccacattgggactgagacacggcccagactcctacgggaggcagcagtggggaatattgggcaatgggcgaaagcctgacccagcaacgccgcgtgaaggaagaaggttttcggatcgtaaacttctgtcctatgtgaagaggagacggtagcataggaggaagccccggctaactacgtgc

SEQ ID NO: 7881 - DNA, 490 bp, unidentified
  misc_feature 1..490: note = Ascusbbf_724623, encodes 16S rRNA
  source 1..490: mol_type = genomic DNA
agagtttgatcatggctcagaacgaacgctggcggcgtgcctaacacatgcaagtcgagcgcgaaagggacttcggtcctgagtaaagcggcgaacgggtgagtaacacgtgagtaacgtaccttcaggtgggggataaccattcgaaaggatggctaataccgcataagaccacactgactaatgtcagaggggtcaaagccgcaaggcgccagaagatcggctcgcgtcccattaggtagttggtggggtaaaggcctaccaagcccgagatgggtagctggtctgagaggacgatcagccacactgggactgagacacggcccagactcctacgggaggcagcagtggggaatcttgcgcaatgggcgaaagcctgacgcagcaacgccgcgtgtgtgaagaaggcccttgggtcgtaaagcactgtcggaagggaagaaaaaaatgacggtaccttccaaggaagcaccggctaactccgtgccag

SEQ ID NO: 7882 - DNA, 490 bp, unidentified
  misc_feature 1..490: note = Ascusbbf_623913, encodes 16S rRNA
  source 1..490: mol_type = genomic DNA
agagtttgatcctggctcaggacgaacgctggcggcgtgcttaacacatgcaagtcgagggcactccttcgggggtgaccggcgaacgggtgcgtaacacgtgagcaacctgcccgcttgtggggaatagccggcccaacggccgggtaataccgcatacgttccatggtccacctggactgtggaggaaagctttagcgcaggcggaggggctcgcggcctatcagctagttggtgcggtaacggcgcaccaaggcagtgacgggtagctggtctgagaggatggccagccacattgggacttagacacggcccagactcctacgggaggcagcagtggggaatactgcgcaatggccgaaaggctgacgcagcgacgccgcgtgggggaggaaggttttcggatcgtaaacccctgttgcccgggacgaactgttggtttcagccaacttgacggtaccgggtgaggaagcaccggctaactccgtgc

SEQ ID NO: 7883 - DNA, 490 bp, unidentified
  misc_feature 1..490: note = Ascusbbf_1891399, encodes 16S rRNA
  source 1..490: mol_type = genomic DNA
agagtttgatcatggctcagagcgaacgtttgcggcgggcctaacacatgcaagtcgaacgagaatcggtccttcgggactgaggacagtggcgcacgggtgcgtaacacgtgggtaatcaaccccctagattgggacaacccggggaaactcgggctaataccggatatggcgactgggacttcggtcctggccgcgaaaggtccgcaagggccactaggggacgagctcgcggcccatcagcttgttggtgaggtaatggctcaccaaggctaagacgggtagctggtctgagaggatgatcagccacactggaactgagacacggtccagactcctacgggaggcagcagtggggaatattgcgcaatgggcgaaagcctgacgcagccacgccgcgtgagcgatgaaggtcttcggatcgtaaagctctgtggggggagaagaatcaagccggtgaagagccggccctgacggtatccccttagca

SEQ ID NO: 7884 - DNA, 490 bp, unidentified
  misc_feature 1..490: note = Ascusbbf_968502, encodes 16S rRNA
  source 1..490: mol_type = genomic DNA
agagtttgatcatggctcaggatgaacgctggcggcgtgcctaacacatgcaagtcgaacgaggctcctctatctgatgtttcgactgaagacggaggatcaccgagtggcggatgggtgagtaacgcgtggagaacctgcccttatcagggggataacaactggaaacggttgacaataccgcatatagtgcatgatcgcatgttcttgcacggaaagatttatcggataaggatggctccgcgttggattagctagttggtggggtaacggcctaccaaggcgacgatccgtagccggcctgggagggcgaccggccacattgggactgagacacggcccagactcctacgggaggcagcagtggggaatattgcacaatgggcgcaagcctgatgcagcgacgccgcgtgaaggaagaagtatttcggtatgtaaacttctatcagcagggaagaaaacgacggtacctgactaagaagccccggct

SEQ ID NO: 7885 - DNA, 490 bp, unidentified
  misc_feature 1..490: note = Ascusbbf_732978, encodes 16S rRNA
  source 1..490: mol_type = genomic DNA
agagtttgatcatggctcaggatgaacgctagcgacaggcctaacacatgcaagtcgaggggcagcgcgggagaagcttgcttttcctggcggcgaccggcgcacgggtgcgtaacaggtgtgcaatctgtcctataccggggcatagcccagcgaaagttggattaattctccatgtgaagcgagaccgcatgatcttgctttgaaacgtaagggtatagggtgagcacgcttctgattaggttgttggcggggtaacggcccaccaagccgacgatcagtaggggttctgagaggaaggtcccccacattggtactgagacacggaccaaactcctacgggaggcagcagtgaggaatattggtcaatgggcgagagcctgaaccagccaagtagcgtgcaggatgactgccctatgggttgtaaactgcttttataggggaataaagtccactacgtgtagtggtttgtatgtaccctatgaataag

SEQ ID NO: 7886 - DNA, 490 bp, unidentified
  misc_feature 1..490: note = Ascusbbf_372228, encodes 16S rRNA
  source 1..490: mol_type = genomic DNA
agagtttgatcatggctcaggacgaacgctggcggcgtgcctaacacatgcaagtcgaacggagtgatcatagcttgctaagatcacttagtggcggacgggtgagtaacgcgtggggaacctgcctttcagagggggataacgttctgaaaagaacgctaataccgcataacgtatgtttatcgcatggtagatataccaaaggagcaatccgctgaaagatggccccgcgtccgattagatagttggtgaggcaacggctcaccaagtcgacgatcggtagccggactgagaggttgaacggccacattgggactgagacacggcccagactcctacgggaggcagcagtgggggatattgcacaatgggggaaaccctgatgcagcaacgccgcgtgagggaagaaggttttcggattgtaaacctctgtccttggtgaagataatgacggtagccgaggaggaagctccggctaactacgtgccag

SEQ ID NO: 7887 - DNA, 490 bp, unidentified
  misc_feature 1..490: note = Ascusbbf_1039312, encodes 16S rRNA
  source 1..490: mol_type = genomic DNA
agagtttgatcctggctcaggacgaacgctggcggcgtgcttcacacgtgcaagtcgaacggaaaggcccagcttgctgggtactcgagtggcgaacgggtgagtaacacgtgagtaatctgcctttggctttgggataagcctcggaaacggggtctaataccggatatgacgcttctttgcatgaagaggtgtggaaagtttttcggctgaaaatgggctcgcggactatcagcttgttggtggggtaatggctcaccaaggctttgacggatagccggcctgagagggcgaccggccacactgggactgagacacggcccagactcctactggaggcagcagtggggaatattgcgcaatgggcgaaagcctgacgcagcgacgccgcgtgagggatgacggccttcgggttgtaaacctctttcggtaccgacgaagcgagagtgacggtaggtgcagaagaagcgccggctaactacgtgccagc

SEQ ID NO: 7888 - DNA, 490 bp, unidentified
  misc_feature 1..490: note = Ascusbbf_478712, encodes 16S rRNA
  source 1..490: mol_type = genomic DNA
agagtttgatcctggctcaggacgaacgctggcggcgtgcttaacacatgcaagtcgagcggtaaggccctttcgggggtacacgagcggcgaacgggtgagtaacacgtgagtaatctgcccttcacttcgggataactaccggaaacggtggctaataccggatatgaccacttcatgcatgtgatggtggtggaaagtgtttagcggtgggggatgtgctcgcggcctatcagcttgttggtgaggtaatggctcaccaaggcttcgacgggtagccggcctgagagggtgaccggccacactgggactgagacacggcccagactcctacgggaggcagcagtggggaatattggacaatgggcggaagcctgatccagcaacgccgcgtgagggatgacggccttcgggttgtaaacctctttcagctctgacgaagcgaaagtgacggtaggagcagaagaagcaccggccaactacgtgccag

SEQ ID NO: 7889 - DNA, 490 bp, unidentified
  misc_feature 1..490: note = Ascusbbf_247682, encodes 16S rRNA
  source 1..490: mol_type = genomic DNA
agagtttgatcctggctcaggacgaacgctggcggcgtgcctaacacatgcaagtcgaacggaaactattcgggaatttcggttcatggatagttttagtggcggacgggtgagtaacgcgtgagaatctgcctttaagtggggaataacagttggaaacgactgctaataccgcataacatgggaaaccatcaaaggaggtgcaagcctccgcttagagatgagctcgcgtctgattagctagttggcagggtaagagcctaccaaggcgacgatcagtagccggcctgagagggtgaacggccacattggaactgagacacggtccaaactcctacgggaggcagcagtggggaatattgcgcaatgggggaaaccctgacgcagcgacgccgcgtgagcgaagaaggccttcgggttgtaaagctctgttttaagggacgaaacctgatactaggaaatgagtagcaattgacggtaccttaagagg

SEQ ID NO: 7890 - DNA, 490 bp, unidentified
  misc_feature 1..490: note = Ascusbbf_341309, encodes 16S rRNA
  source 1..490: mol_type = genomic DNA
agagtttgatcatggctcaggatgaacgctggcggcgtgcctaacacatgcaagtcgaacgatgaaaccgcctccgggcggacatgaagtggcgaacgggtgagtaacacgtgaccaacctgccccgcgcaccgggacagccccccgaaagggggattaataccggatactccggccgggccgcatggcccggccgggaaagctccggcggcgcgggatggggtcgcggcccatcaggtagtaggtcgggtagaggccgacctagccgacgacgggtagccgggttgagagaccgaccggccacattgggactgagatacggcccagactcctacgggaggcagcagtggggaatattgcgcaatgggggcaaccctgacgcagcaacgccgcgtgcgggatgaaggcgtccgcgtcgtaaaccgctttcagcagggaggaaacctgacagtacctgcagaagaagccccggctaactacgtgccagcag

SEQ ID NO: 7891 - DNA, 490 bp, unidentified
  misc_feature 1..490: note = Ascusbbf_1866772, encodes 16S rRNA
  source 1..490: mol_type = genomic DNA
agagtttgatcatggctcaggacgaacgctggcggcgtgcctaacacatgcaagtcgaacggagtattccacccgagaccagatgtagcttgctacggatgggatcaattgggatacttagtggcggacgggtgagtaacgcgtgaataacctgcccaacagagggggataacgtttggaaacgaacgctaataccgcataacattacggtatcgcatggtacagtaatcaaaggagcaatccgctgatggatggattcgcgtccgattagctagttggtgagataagagctcaccaaggcgacgatcggtagccggactgagaggttgaacggccacattgggactgagacacggcccagactcctacgggaggcagcagtgggggatattgcacaatgggggaaaccctgatgcagcaacgccgcgtgagggaagaaggttttcggattgtaaacctctgtcctaggtgaagataatgacggtagcct

SEQ ID NO: 7892 - DNA, 490 bp, unidentified
  misc_feature 1..490: note = Ascusbbf_1780079, encodes 16S rRNA
  source 1..490: mol_type = genomic DNA
agagtttgatcatggctcaggacgaacgctggcggcgtgcctaacacatgcaagtcgaacggggtaactcgctgaaattgagatcagcttgctgaaggaaatttcttgagttacttagtggcggacgggtgagtaacgcgtgagcaacctgccttacagagggggacaacagttggaaacgactgctaataccgcatgacgtcgcgggaccgcatgatcctgcgaccaaagatttatcgctgtaagatgggctcgcgtccgattagatagttggtgaggtaacggcccaccaagtcgacgatcggtagccggactgagaggttgaacggccacattgggactgagacacggcccagactcctacgggaggcagcagtgggggatattgcacaatgggcgaaagcctgatgcagcaacgccgcgtgaaggaagaaggtcttcggattgtaaacttctgttttcggtgaagaaacaaatgacggtagccgaa

SEQ ID NO: 7893 - DNA, 490 bp, unidentified
  misc_feature 1..490: note = Ascusbbf_1839404, encodes 16S rRNA
  source 1..490: mol_type = genomic DNA
agagtttgatcctggctcaggacgaacgctggcggcgtgcttaacacatgcaagtcgagcggtaaggccctttggggtacacgagcggcgaacgggtgagtaacacgtgggtgatctgccttgcactctgggataagcctgggaaactgggtctaatactggatatgaccgcgaatcgcatggtttgtggtggaaagatttatcgatgcgagatgggcccgcggcctatcagcttgttggtggggtaatggcctaccaaggcgacgacgggtggccggcctgagagggcgaccggccacactgggactgagacacggcccagactcctacgggaggcagcagtggggaatattgcacaatgggcggaagcctgatgcagcgacgccgcgtgagggatgacggccttcgggttgtaaacctctttcgactccgacgaagcgtaagtgacggtaggagtagaagaagcaccggccaactacgtgccagcagc

SEQ ID NO: 7894 - DNA, 490 bp, unidentified
  misc_feature 1..490: note = Ascusbbf_1829113, encodes 16S rRNA
  source 1..490: mol_type = genomic DNA
agagtttgatcatggctcaggatgaacgctggcggcatgcctaagacatgcaagtcgaacgaggtgccccgatgaagatgaagtgcttgcacagatttggattcggatcagcacctagtggcggacgggtgagtaacacgtgggtgacctacctttgagactgggatacctattggaaacgatagttaataccggataacacattaattcgttttaatgttaaaaggagcctttaaagcttcactcttagatgggcctgcggagtattagatagttggtggggtaatggcctaccaagtcgacgatgcttagccgaactgagaggttgatcggccacattgggactgagacacggcccaaactcctacgggagacagcagttaggaatattcgtcaatgggggaaaccctgaacgagcaatgccgcgtgaacgatgaaggccctctgggttgtaaagttctgttacttgggaagaatatctaagataaga

SEQ ID NO: 7895 - DNA, 490 bp, unidentified
  misc_feature 1..490: note = Ascusbbf_1782101, encodes 16S rRNA
  source 1..490: mol_type = genomic DNA
agagtttgatcatggctcaggatgaacgctggcggcgcatttaagacatgcaagtcgaacgaaaacactcaattgaaatcgatttgaagatttatctgatatgaagtttcgcccgagtgttttagtggcggacgggtgagtaatacgtagataacctgccttatagacagaaataactactggaaacggtagctaatgtctgataagaccacgcttaggcatctaagagcggtcaaaggggtaacccgctataagatggatctacggctgattagttagttggtgagataacagcccaccaagacgatgatcagtagccgagctgagaggctggccggccacattgggactgagacacggcccagactcctacgggaggcagcagttgggaatattggacaatggaggaaactctgatccagtgacgccgcgtgaaggaagaaggtcttcggattgtaaacttattttatcagggaagaaacaaatgact

SEQ ID NO: 7896 - DNA, 490 bp, unidentified
  misc_feature 1..490: note = Ascusbbf_1681911, encodes 16S rRNA
  source 1..490: mol_type = genomic DNA
agagtttgatcatggctcaggacgaacgctggcggcgtgcctaacacatgcaagtcgaacggaactttgcgctgaaattgagagcagcttgctgcaggaagtttcttgtaaagtttagtggcggacgggtgagtaacgcgtgaggaacctgccttacagagggggacaacagttggaaacgactgctaataccgcataacatagcgagaggacatcctcttgttatcaaaggagcaatccgctgtaagatggcctcgcgtccgattagatagttggcggggtaacggcccaccaagtcgacgatcggtagccggactgagaggttgaacggccacattgggactgagacacggcccagactcctacgggaggcagcagtgggggatattgcacaatggaggaaactctgatgcagcaacgccgcgtgagggaagaaggttttcggattgtaaacctctgtttttagtgacgaaacaaatgacggtagcta

SEQ ID NO: 7897 - DNA, 490 bp, unidentified
  misc_feature 1..490: note = Ascusbbf_1600958, encodes 16S rRNA
  source 1..490: mol_type = genomic DNA
agagtttgatcatggctcaggatgaacgctggcggcgtgcctaacacatgcaagtcgaacggttaagccggcttcggccgggtatacagtggcgaacgggtgagtaacacgtgaccaacctgccccgcgctccgggatagccccgcgaaagcgagattaataccggatgacgcgggaggggcgcatgcccctcccgccaaagcccaggcggcgcgggatggggtcgcggcccattaggtagtaggcggggtgacggcccacctagccgacgatgggtagccgggttgagagaccgaccggccacattgggactgagatacggcccagactcctacgggaggcagcagtggggaatattgcgcaatgggggcaaccctgacgcagcaacgccgcgtgcgggaagaaggccctcgggttgtaaaccgctttcagcagggaagatcgtgacggtacctgcagaagaagccccggctaactacgtgccagcagc

SEQ ID NO: 7898 - DNA, 490 bp, unidentified
  misc_feature 1..490: note = Ascusbbf_1843501, encodes 16S rRNA
  source 1..490: mol_type = genomic DNA
agagtttgatcatggctcagaacgaacgctggcggcgtgcttaacacatgcaagtcgtgcgcgactgggcttcggtccagttgagcggcgaacgggtgcgtaacacgtggataatctgccttcgggctcggaataacctctcgaaagaggggctaataccggataagcccccggggacttcggttcctgagggaaaaggtggcctctatttataagctaccacctgaagatgagtccgcggcccatcagctagttggcggggtaatggcccaccaaggctacgacgggtagctggtctgagaggacgatcagccacactgggactgagacacggcccagactcctacgggaggcagcagtggggaatcttgcgcaatggacgaaagtctgacgcagcaacgccgcgtgagtgatgaaggtctttggatcgtaaagctctttcggctgggaagaaccgcctcgtggctaatatccacgaggtctgacggta

SEQ ID NO: 7899 - DNA, 490 bp, unidentified
  misc_feature 1..490: note = Ascusbbf_464518, encodes 16S rRNA
  source 1..490: mol_type = genomic DNA
agagtttgatcatggctcaggatgaacgctggcggcgtgcttaacacatgcaagtcgagcgagaagctcatgaacaattcttcggaagcgggaatgagtggaaagcggcggacgggtgagtaacgcgtaggcaacctgccccgtacaaagggatagctactggaaacggtaattaatacctcataacacggagatgccgcatggcatcatcgtcaaagatttatcggtatgggatgggcctgcgtctgattagcttgttggtggggtaacggctcaccaaggcgacgatcagtagccgacctgagagggtaaacggccacattggaactgagacacggtccaaactcctacgggaggcagcagtggggaatattgcacaatggggggaaccctgatgcagcaacgccgcgtgagcgaagaaggcctttgggtcgtaaagctctgtcctgaaggaagaaggaagtgacggtacttcaggaggaagccccgg

SEQ ID NO: 7900 - DNA, 490 bp, unidentified
  misc_feature 1..490: note = Ascusbbf_980997, encodes 16S rRNA
  source 1..490: mol_type = genomic DNA
agagtttgatcatggctcagaacgaacgctggcggtgcgttttaagcatgcaagtcgagcggcaagtgctagcaatagcacctagagcggcggacgggtgagtaacacgtggataatctacctcggagtttgggatataccgtggaaacacggagtaataccggatacgatgccacttggagacaagtgtcaggaaagatgctacggcatcgctttgagatgagtccgcggcccattagctagacggcggggtaaaggcccaccgtggcgatgatgggtagccggcctgagagggtgtacggccacattgggactgagacacggcccagactcctacgggaggcagcagctaagaatcttccgcaatggacgaaagtctgacggagcgacaccgcgtgaatgatgaaggccgaaaggttgtaaaattcttttctgttggaggaataaactttcgagggaatgcgagagcgatgacgttaaaacaggaata

SEQ ID NO: 7901 - DNA, 490 bp, unidentified
  misc_feature 1..490: note = Ascusbbf_1287736, encodes 16S rRNA
  source 1..490: mol_type = genomic DNA
agagtttgatcctggctcaggatgaatgctggcggcatgcctaatacatgcaagtcgagcggcaacgagggtttcatcctattctggaagtgattcgagagtagaatgaaacctgtcggcgagcggcggacggctgagtaacgcgtgggaacgtaccccaaactgagggataactagtcgaaagattagctaataccgcatgtgatcttcggattaaagctttcgggcggtttgggaatggcctgcgtacgattagatagttggtgaggtaatggctcaccaagtcgacgatcgttagatggtttgagaggatgatcatccagactgggactgagacacggcccagactcctacgggaggcagcagtagggaatctttcacaatgggcgaaagcctgatggagcaatgccgcgtgcaggacgaaggccttcgggttgtaaactgcttttataagcgaggaatatgacggtaacttatgaataaggatcgg

SEQ ID NO: 7902 - DNA, 490 bp, unidentified
  misc_feature 1..490: note = Ascusbbf_449515, encodes 16S rRNA
  source 1..490: mol_type = genomic DNA
agagtttgatcatggctcaggatgaacgctggcggcgtgcttaacacatgcaagtcgaacggaacttttctcccgaagcgattgcgagcttgctcaagatcaattcatttgaaaagtttagtggcggacgggtgagtaacgcgtgggtaacctgccgtatgccgggggacaacagttggaaacgactgctaataccgcataagcgcacagtatcgcatgatacagtgtgaaaaactccggtggcatacgatggacccgcgtctgattagctagttggtgaggtagcggcccaccaaggcgacgatcagtagccggcctgagagggtgaacggccacattgggactgagacacggcccaaactcctacgggaggcagcagtggggaatattgcacaatgggggaaaccctgatgcagcgacgccgcgtgagtgaagaagtatttcggtatgtaaagctctatcagcagggaagaaaatgacggtacctgac

SEQ ID NO: 7903 - DNA, 490 bp, unidentified
  misc_feature 1..490: note = Ascusbbf_1410463, encodes 16S rRNA
  source 1..490: mol_type = genomic DNA
agagtttgatcctggctcaggacgaacgctggcggcgtgcttaacacatgcaagtcgagcggaaaggccccttcgggggtactcgagcggcgaacgggtgagtaacacgtgagcaacctgcccttgacttcgggataagcctgggaaactgggtctaataccggatatgaccattgcgtgcatgcgtggtggtggaaagtttttcggttggggatgggctcgcggcctatcagcttgttggtggggtgatggcctaccaaggcttcgacgggtaaccggcctgagagggcgaccggtcacactgggactgagacacggcccagactcctacgggaggcagcagtggggaatattgcgcaatgggcggaagcctgacgcagcgacgccgcgtgggggatgacggccttcgggttgtaaacctctttcagcatcgacgaagctcttttggggtgacggtaggtgcagaagaagcgccggctaactacgtgcc

SEQ ID NO: 7904 - DNA, 490 bp, unidentified
  misc_feature 1..490: note = Ascusbbf_1753095, encodes 16S rRNA
  source 1..490: mol_type = genomic DNA
agagtttgatcctggctcaggacgaacgctggctgcgtgcttaacacatgcaagtcgaacgctgaagcccgcagcttgctgtgggtggatgagtggcgaacgggtgagtaacacgtgagtaacctgcccccgacttcgggacaagcccgggaaactgggtctaataccggatatgacaaccgaaggcatcttcggttgtggaaagttttttcggttggggatgggctcgcggcctatcagtttgttggtgaggtaatggctcaccaagacgacgacgggtagccggcctgagagggcgaccggccacactgggactgagacacggcccagactcctacgggaggcagcagtggggaatattgcacaatgggggaaaccctgatgcagcgacgcagcgtgcgggatgacggccttcgggttgtaaaccgctttcagcagggaagaagccccttggggtgacggtacctgcagaagaagtaccggctaacta

SEQ ID NO: 7905 - DNA, 490 bp, unidentified
  misc_feature 1..490: note = Ascusbbf_1811440, encodes 16S rRNA
  source 1..490: mol_type = genomic DNA
agagtttgatcatggctcaggatgaacgctagcggcaggcttaacacatgcaagtcgagcggagtttagtggaaggaggattcgtccaacggaacctaaacttagcggcggatgggtgaggaacgcgtggataacctaccgtgcacagggggataacagttggaaacgactgttaataccgcatatgctcacagtaccgcatggtacagggaggaaagattaatcggtgcatgatggatccgcgtcggattagccagttggcggggtaacggcccaccaaagcgatgatccgtagccggcctgagagggcgaccggccacattgggactgagacacggcccaaactcctacgggaggcagcagtgggggatattgcacaatgggggaaaccctgatgcagcgacgccgcgtgaaggaagaagtatttcggtatgtaaacttctatcagcagggaagaaaatgacggtacctgactaagaagccccggcta

SEQ ID NO: 7906 - DNA, 490 bp, unidentified
  misc_feature 1..490: note = Ascusbbf_1042808, encodes 16S rRNA
  source 1..490: mol_type = genomic DNA
agagtttgatcctggctcaggatgaacgctggcggcgcgcctaacacatgcaagtcgagcggaggacccgccctcgggcgggcgatcagcggcgaacgggtgagtaacgcgtgggcaacctgcccccccctcgggaatagctccgggaaaccggtggtaacgcccgacggcccggagagagggcatcccctctccggcaaagctccggcggggggggatgggcccgcgtcccatcagctagacggcggggtgacggcccaccgtggcgacaacgggtagccgggctgagaggccggacggccacattgggactgagacacggcccagactcctacgggaggcagcagtggggaatattgcgcaatgggggcaaccctgacgcagcgacgccgcgtgcgggacggaggccctcgggccgtgaaccgctttcggcggggacgatagtgacggtacccgcagaagaagccccggctaactacgtgccagcagc

SEQ ID NO: 7907 - DNA, 490 bp, unidentified
  misc_feature 1..490: note = Ascusbbf_1792446, encodes 16S rRNA
  source 1..490: mol_type = genomic DNA
agagtttgatcatggctcaggatgaacgctggcggcgtgcctaatacatgcaagtcgagcgaaccgatggagtgcttgcattcctgaggttagcggcggacgggtgagtaacacgtaggcaacctgcctgtacgaccgggataactccgggaaccggagctaataccggataggatgccgaaccgcatggttcggcatggaaaggcctttgagccgcgtacagatgggcctgcggcgcattagctagttggtggggtaacggcctaccaaggcgacgatgcgtagccgacctgagagggtgaacggccacactgggactgagacacggcccagactcctacgggaggcagcagtagggaatcttccgcaatggacgaaagtctgacggagcaacgccgcgtgagtgaggaaggtcttcggatcgtaaaactctgttgtcagggaagaaccgccgggatgacctcccggtctgacggtacctgacgagaaa

SEQ ID NO: 7908 - DNA, 490 bp, unidentified
  misc_feature 1..490: note = Ascusbbf_1540760, encodes 16S rRNA
  source 1..490: mol_type = genomic DNA
agagtttgatcatggctcaggatgaacgctggcggcgtgcctaacacatgcaagtcgaacggaacttttaagggacaagacttcggtcaagtgatatttaagtttagtggcggacgggtgagtaacgcgtgagcaacctgcctttcagagggggataacgtccggaaacggacgctaataccgcatgacatagatttatcgcatggtgaatctatcaaagattttatcgctgagagatgggctcgcgtccgattaggtagttggtggggtaacggctcaccaagccgacgatcggtagccggactgagaggttgaacggccacattgggactgagacacggcccagactcctacgggaggcagcagtggggaatattgcacaatgggcgcaagcctgatgcagcaacgccgcgtgagggaagacggttttcggattgtaaacctctgtctttggtgacgaagaagtgacggtagccaaggaggaagccac

SEQ ID NO: 7909 - DNA, 469 bp, unidentified
  misc_feature 1..469: note = Ascusbbf_1593557, encodes 16S rRNA
  source 1..469: mol_type = genomic DNA
agagtttgatcatggctcaggatgaacgctggcggcgtgcctaacctatgcaagtcgaacgaggcttcgagccgagtggcggacgagtgagtaacacgtacctaatctgcctgtaagtggggaataaccgcccgaaagggtggctaataccccatgtgctctacggagtaaagcttttgcgcttacagatgagggtgcgacctatcagctagttggtgaggtaaaggcttaccaaggctatgacgggtagctggtctgagaggatgatcagccacgctgggactgagaacggcccagactcctacgggaggcagcaagtgggaatattgcacaatgggcgaaagcctgatgcagcgacgccgcgtgggggatgaaggttttcggatcgtaaaccccttttatcgattaggaagataagaccagtcgatgaataagcacctgctaactacgtgccagcagccgcggtaat

SEQ ID NO: 7910 - DNA, 490 bp, unidentified
  misc_feature 1..490: note = Ascusbbf_1570091, encodes 16S rRNA
  source 1..490: mol_type = genomic DNA
agagtttgatcatggctcaggatgaacgctagcggcaggctcaacacatgcaagtcgaacgaagcactggaccttcgggaccggtgactgagtggcggacgggtgagtaacgcgtgggtaacctgccctgtacagggggataacagttagaaatgactgctaataccgcataagcacacgagggggcatccctttgtgtgaaaaactccggtggtacaggatgggcccgcgtctgattagccagttggcagggtaacggcctaccaaagcgacgatcagtagccggtctgagaggatgaacggccacattggaactgagacacggtccaaactcctacgggaggcagcagtggggaatattgcacaatgggggaaaccctgatgcagcaacgccgcgtgagtgaggaagtatttcggtatgtaaagctctatcagcagggaagataatgacggtacctgacgaagaagctccggctaaatacgtgccagc

SEQ ID NO: 7911 - DNA, 490 bp, unidentified
  misc_feature 1..490: note = Ascusbbf_608315, encodes 16S rRNA
  source 1..490: mol_type = genomic DNA
agagtttgatcctggctcaggacgaacgctggcggcgtgcctaatacatgcaagtcgagcggagagaacagaagcttgcttctgtttctctcagcggcggacgggtgagtaacacgtgggcaacctgccctgcagatcgggataactccgggaaaccggtgctaataccggatagtttgttctgcctcctggcagaacacggaaagacggtttcggctgtcactgcaggatgggcccgcggcgcattagctagttggtggggtaatggctcaccaaggccacgatgcgtagccgacctgagagggtgattggccacactgggactgagacacggcccagactcctacgggaggcagcagtagggaatcttccgcaatggacgaaagtctgacggagcaacgccgcgtgagtgatgaaggttttcggatcgtaaaactctgttgtgagggaagaacaagtgccacttaactactggcaccttgacggtacc

SEQ ID NO: 7912 - DNA, 490 bp, unidentified
  misc_feature 1..490: note = Ascusbbf_1873877, encodes 16S rRNA
  source 1..490: mol_type = genomic DNA
agagtttgatcatggctcaggatgaacgctggcggcgtgcttaacacatgcaagtcgaacggagtatatcaaccgagaccttcgggtctcacctgttatacttagtggcggacgggtgagtaacgcgtgagcaaccaaccttctgcagtgggacaacaattagaaatgattgctaataccgcataagaccacagcatcgcatggtgcagtgagaaaagctgaggcggcagaaggcgggctcgcgttcgattagctggatggtgaggtaacggctcaccatggcgacgatcgatagccggactgagaggtcgaccggccacattgggactgagacacggcccagactcctacgggaggcagcagtggggaatattgcacaatgggggaaaccctgatgcagcgacgccgcgtgagtgatgaagtatttcggtatgtaaagctcttttagcagggaagaaaatgacagtacctgaagaaacagccccggcta

SEQ ID NO: 7913 - DNA, 490 bp, unidentified
  misc_feature 1..490: note = Ascusbbf_1856858, encodes 16S rRNA
  source 1..490: mol_type = genomic DNA
agagttgatcatggctcaggatgaacgctagcggcaggcttaacacatgcaagtcgaggggtaacgcggtgtagcaatacactggcgacgaccggcgcacgggtgcgtaacgcgtatgcaacctaccttgtacagggggataacggagggaaacttccactaatatccatagtgttgggggatcgcatgattctccaactaaagctacggtggtgcaagatgggcatgcgtgacattagctagttggtaaggtaacggcttaccaaggcgacgatgtctaggggagctgagaggcttatcccccacactggtactgagacacggaccagactcctacgggaggcagcagtgaggaatattggtcaatggacggaagtctgaaccagccatgccgcgtggaggaagaaggtcctatgggttgtaaactccttttgttcgagagtaataagggctttgcgaagcccgatgagagtatcggacgaataagcat

SEQ ID NO: 7914 - DNA, 490 bp, unidentified
  misc_feature 1..490: note = Ascusbbf_84917, encodes 16S rRNA
  source 1..490: mol_type = genomic DNA
agagtttgatcatggctcaggatgaacgctggcggcgtgcctaacacatgcaagtcgaacggaaacttatggaacggagattcgtcgaagagaaataagttttagtggcggacgggtgagtaacgcgtgggtaacctgcctcatagagggggataacagctggaaacgactgctaataccgcataagcccacagtaccgcatggtacagggggaaaagaattatcgctatgagatggacccgcgtctgattaactggttggtgaggtaacggcccaccaaggttacgatcagtagccggactgagaggttgaacggccacattgggactgagacacggcccaaactcctacgggaggcagcagtgggggatattgcacaatgggggaaaccctgatgcagcgacgccgcgtgggtgaagaagtctttcgggatgtaaagccctatcagcagggaagataatgacggtacctgactaagaagccccggcta

SEQ ID NO: 7915 - DNA, 490 bp, unidentified
  misc_feature 1..490: note = Ascusbbf_462102, encodes 16S rRNA
  source 1..490: mol_type = genomic DNA
agagtttgatcctggctcagaacgaacgctggcggcgcgtcttaagcatgcaagtcgagcgggattcatgtgcttgcacatgatgagagcggcggactggcgaggagcgcgtgggcgacgcgccccccggactggaacagcccgtggaaacacggggtaatgccggacggcatgcggagtttggagactccgcatcaaaggggcttcggccccgccgggggagcggcccgcgtcccatcagctagttggcggggaaaaggcccaccaaggctgcgacgggtatccggcctgagagggcgatcggacgcattgggactgagatacggcccagactcctacgggaggcagcagctaagaatattccgcaatgggcgaaagcctgacggagcgacgccgcgtggacgatggaggccggaaggttgtaaagtccttttgggaaggaagaagaagcgggggaggaaacgcctccgcggcgacggtacttcgcgaa

SEQ ID NO: 7916 - DNA, 490 bp, unidentified
  misc_feature 1..490: note = Ascusbbf_1562145, encodes 16S rRNA
  source 1..490: mol_type = genomic DNA
agagtttgatcctggctcaggatgaacgctagctacaggcttaacacatgcaagtcgaggggaaacgacatagagtgcttgcactttatgggcgtcgaccggcgaatgggtgagtaacgcgtatccaacctgcccttgactgagggatagcccagtgaaaactgaattaatacctcatgtcctcctcagacggcatcagacgaggagtaaagatttatcggtacaggatggatccgcgtttgattagccagttggcggggtaacggcccaccaaagcgacgatcaatagccggcctgagagggcggacggccacattgggactgagacacggcccagactcctacgggaggcagcagtgggggatattgcacaatggacgaaagtctgatgcagcgacgccgcgtgagtgaagaagtatttcggtatgtaaagctctatcagcagggaagaaaggctccgcaaggagagatgacggtacctgagtaagaa

SEQ ID NO: 7917 - DNA, 490 bp, unidentified
  misc_feature 1..490: note = Ascusbbf_1348878, encodes 16S rRNA
  source 1..490: mol_type = genomic DNA
agagtttgatcctggctcaggatgaacgctggcggcgtgcctaacacatgcaagtcgaacggagttattttggaaagttcttcggaactggaatctataacttagtggcggacgggtgagtaacgcgtgagcaatctgcccttaggtgggggataacagtcggaaacggctgctaataccgcataaaacattttgaaggcatcttcgaaatgtcaaagatttattgcctttggatgagctcgcgtctgattagctggttggtgaggtaacggcccaccaaggcgacgatcagtagccggactgagagggtgaacggccacattgggactgagacacggcccagactcctacgggaggcagcagtggggaatattgcgcaatggggggaaccctgacgcagcaacgccgcgtgattgaagaaggccttcgggttgtaaagatctttaattagggacgaaacatgacggtacctaaagaataagctccggct

SEQ ID NO: 7918 - DNA, 490 bp, unidentified
  misc_feature 1..490: note = Ascusbbf_196212, encodes 16S rRNA
  source 1..490: mol_type = genomic DNA
agagtttgatcctggctcaggacgaacgctggcggcatgcctaacacatgcaagtcgaacggtctaagagataaatttttaatttatttcaaggatagtggcgaacgggtgagtaacgcgtgagcaacctaccttttagagggggataacgcttggaaacaggcgctaataccgcataagctccgagaattgagtggttccaggagaaaaggagaaatccgctaaaagatgggctcgcgtccgattagctagttggtgagataacagcccaccaaggcaacgatcggtagccggactgagaggttgaacggccacattgggactgagacacggcccagactcctacgggaggcagcagtgggggatattgcacaatggggggaaccctgatgcagcaatgccgcgtgagggaagaagtttttcggaatgtaaacctctgtccttcgggaagataatgacggtaccgaaggaggaagctccggctaactac

SEQ ID NO: 7919 - DNA, 490 bp, unidentified
  misc_feature 1..490: note = Ascusbbf_731748, encodes 16S rRNA
  source 1..490: mol_type = genomic DNA
agagtttgatcctggctcaggatgaacgctagcggcaggcttaacacatgcaagtcgaggggcagcgcgtcgtagcaatacgatggcggcgaccggcgcaagggtgcgtaacgcgtgagcaatctgcccgtatcagggggataagcgatggaaacgtcgtctaataccgcataacagttggggaggcatctttccgacttgaaagcttcggtggatacggatgagctcgcgagacattagttagttggcggggtaacggcccaccaagaccgcgatgtctaggggaactgagaggttggtcccccacactggaactgagacacggtccagactcctacgggaggcagcagtgaggaatattggacaatggccggaaggctgatccagccatgccgcgtgaaggataaggtcctatggattgtaaacttcttttgagtgggagcaataagggtgtcgtgacacccgatgagagtaccattcgaataagcat

SEQ ID NO: 7920 - DNA, 490 bp, unidentified
  misc_feature 1..490: note = Ascusbbf_635545, encodes 16S rRNA
  source 1..490: mol_type = genomic DNA
agagtttgatcatggctcaggacgaacgctggcggcatgcttaacacatgcaagtcgaacgatgcaaaagcaaatcagcgatgaggcgattttgtatagtggcgaacgggtgagtaacgcgtgagcaacctgccttgtacattgggacaccagagggaaacttctgttaataccgaataagaccacggcgtcgcatgacgcaggggtaaaagcgatttagcggtacaagatgggctcgcgtcccattagctagttggcgggataacagcccaccaaggcgacgatgggtagccgacttgagagagtgatcggccacaatggaactgagacacggtccatactcctacgggaggcagcagtggggaatattgggcaatgggcgaaagccttacccagcaatgccgcgtgaatgatgaaggtcttcggattgtaaagttcttttattagtcatgaacacaatgacagtagctaatgaataagccccggctaa

SEQ ID NO: 7921 - DNA, 490 bp, unidentified
  misc_feature 1..490: note = Ascusbbf_678676, encodes 16S rRNA
  source 1..490: mol_type = genomic DNA
agagtttgatcatggctcaggacgaacgctagcgacaggcttaacacatgcaagtcgaggggcagcggtggagagagcttgctctcttcagccggcgaccggcgcacgggtgagtaacacgtatgcaacctgcccttgacactgggataacccggagaaatccggactaataccgggcgatacccctggaggacatcctccggaggtcgaaggaagcgattccggtcaaggatgggcatgcggcgcattagctagttggcggggtaacggcccaccaaggcgacgatgcgtaggggttctgagaggaaggtcccccacattggtactgagacacggaccaaactcctacgggaggcagcagtgaggaatattggtcaatgggcgcgagcctgaaccagccaagtcgcgtgagggaggacggccctacgggttgtaaacctcttttgtcggggagcaaggactgccacgtgtggcagggcgagagtacccg

SEQ ID NO: 7922 - DNA, 490 bp, unidentified
  misc_feature 1..490: note = Ascusbbf_5071, encodes 16S rRNA
  source 1..490: mol_type = genomic DNA
agagtttgatcatggctcaggatgaacgctggcggcgtgcctaacacatgcaagtcgaacgaagcatatacggcagaacttttcggagtgaagcggtttatgacttagtggcggacgggtgagtaacgcgtgggcaacctgcccttaaccgggggacaacagttggaaacggctgctaataccgcataagcgcacggaaccgcatggttcagtgtgaaaaattccggtggttaaggatgggcccgcgttggattaggtagttggtgcggtaacggcgcaccaagccgacgatccatagccgacctgagagggtgaccggccacattgggactgagacacggcccagactcctgcgggaggcagcagtggggaatattgcacaatgggggaaaccctgatgcagcgacgccgcgtgagtgaagaagtatttcggtatgtaaagctctttcggcagggaagaagatgacggtacctgcagaagaagccccgg

SEQ ID NO: 7923 - DNA, 490 bp, unidentified
  misc_feature 1..490: note = Ascusbbf_34467, encodes 16S rRNA
  source 1..490: mol_type = genomic DNA
agagtttgatcatggctcaggattaacgctggcggcatgcctaatacatgcaagtcgaatggtttagcttgctagaccatggcgaacgggtgagtaacacgtaggtaacctaccttaaggacgaggataacctttggaaacgaaggataatactggataggacatcacaaatcacatgattagatgtttaaaggagcgatccaccataagaggggcctgcggcgcattagctagttggtgaggtaagggcccaccaaggcgatgatgcgtagctggactgagaggttgaacagccacaatgggactgagaacggcccatactcctacgggaggcagcagtagggaattttcggcaatgggcggaagcctgaccgagcaatgccgcgtgatcgaagaagtatttcggtatgtaaagatcttttatttgggaagaaaaaacaaattgactgaaccaaatgaataagctccggctaactacgtgccagcagcc

SEQ ID NO: 7924 - DNA, 490 bp, unidentified
  misc_feature 1..490: note = Ascusbbf_727372, encodes 16S rRNA
  source 1..490: mol_type = genomic DNA
agagtttgatcatggctcaggattaacgctggcggcatgcctaatacatgcaagtcgaatggactagcttgctagtccatggcgaacgggtgagtaacacgtaggtaacctaccttaaggacgaggataacctttggaaacgaaggataatactggataggacattaaaaatcacgtgattaaatgtttaaaggagcaatccaccataagaggggcctgcggcgcattagctagttggtgaggtaaaggcccaccaaggcgatgatgcgtagctggactgagaggttgaacagccacaatgggactgagaacggcccatactcctacgggaggcagcagtatggaattttcggcaatggacaaaagtctgaccgagcaatgccgcgtgatcgaagaagtatttcggtatgtaagatcttttatttgggaagaaaaaacaaattgactgaaccaaatgaataagctccggctaactacgtgccagcagccg

SEQ ID NO: 7925 - DNA, 490 bp, unidentified
  misc_feature 1..490: note = Ascusbbf_25919, encodes 16S rRNA
  source 1..490: mol_type = genomic DNA
agagtttgatcctggctcaggatgaacgctagcgacaggcctaacacatgcaagtcgaggggcagcatggagtagcaatactctgatggcgaccggcgcacgggtgcgtaacaggtgtgcaatctatccgtaatcggggaatagcccggcgaaagttggattaatgctccatgtgagtggaagccgcatggttttcatttaaaacgtgaggattacggttgagcacgcttctgattaggtagttggtgaggtaacggctcaccaagccgacgatcagtaggggttctgagaggaaggtcccccacattggaactgagacacggtccaaactcctacgggaggcagcagtgaggaatattggtcaatgggcggaagcctgaaccagccaagtcgcgtgaaggatgaaggttctatggattgtaaacttcttttattcgagggtaaagtgccggacgtgtccggtattgcaagtatcgaatgaataagcatc

SEQ ID NO: 7926 - DNA, 490 bp, unidentified
  misc_feature 1..490: note = Ascusbbf_60383, encodes 16S rRNA
  source 1..490: mol_type = genomic DNA
agagtttgatcatggctcaggatgaacgctggcggcaggcttaatacatgcaagtcgaacggtaaggcccgaagtggcaacacggagggtacacgagtggcgcacgggtgcgtaacgcgtatgcaacctgcccctcaccgggacaaaacagctggaaacggctgctaatatcccatggctacctgagagggcatccttttaggtataaagattcattggtgagggatgggcatgcgtattattaggtagttggcggggtaacggcccaccaagccgacgatgattaggggttctgagaggaaagacccccacactggaactgagacacggtccagactcctacgggaggcagcagtagggaatattgggcaatggaggcaactctgacccagccatgccgcgtgaaggaataaggccctatgggtcgtaaacttcttttatcgtggagtaaacccggccacgtgtggccggttgagagtacacgaggaat

SEQ ID NO: 7927 - DNA, 490 bp, unidentified
  misc_feature 1..490: note = Ascusbbf_28203, encodes 16S rRNA
  source 1..490: mol_type = genomic DNA
agagtttgatcatggctcaggatgaacgctagcggcaggcttaacacatgcaagtcgaggggcagcgggtgtagcaatacatgccggcgaccggcgcaagggtgcgtaacgcgtgagcaatctgcccgtatcagggggataagcgatggaaacgtcgtctaataccgcataacaccaatgatggcatcatcgatggttgaaagcttcggtggatacggatgagctcgcgagacattagttagttggcggggtaacggcccaccaagaccgcgatgtctaggggaactgagaggttggtcccccacactggaactgagacacggtccagactcctacgggaggcagcagtgaggaatattggacaatggccggaaggctgatccagccatgccgcgtgaaggaataaggtcctatggattgtaaacttcttttgtacgagagcaataagtgtcacgtgtgacacgatgagagtatcgtacgaataagcatc

SEQ ID NO: 7928 - DNA, 490 bp, unidentified
  misc_feature 1..490: note = Ascusbbf_112661, encodes 16S rRNA
  source 1..490: mol_type = genomic DNA
agagtttgatcatggctcaggatgaacgctggcggcgtgcttaacacatgcaagtcgagcgagaaatgttcaaacagagattcgtcaacgggcggacatggacagcggcggacgggtgagtaacgcgtaggtaacctacccttaactgcgggatagcctagggaaacctggattaataccacataatgcgttggagtcacatggctttaacgccaaagatttatcggttaaggatggacctgcgtctgattagccagttggtggggtaacggcctaccaaagcgacgatcagtagccgacctgagagggtgatcggccacattggaactgagacacggtccaaactcctacgggaggcagcagtggggaatattgcacaatgggcgcaagcctgatgcagcaacgccgcgtgagcgaagaaggccttcgggttgtaaagctctgtccttagggacgaagaagtgacggtacctaaggaggaagccccggc

SEQ ID NO: 7929 - DNA, 490 bp, unidentified
  misc_feature 1..490: note = Ascusbbf_186547, encodes 16S rRNA
  source 1..490: mol_type = genomic DNA
agagtttgatcatggctcagaatgaacgttggcggcgtggattaggcatgcaagtcgtacggtaagccccatagcttgctacggggcctagagtggcgaaagggataggataatgtagatgacataccctcgggaccgggatagcgtttggaaacgaacggtaataccggataacatctccggatcaaaggtgagattccgcctgaggattggtttacacactattagatagttggcggggtaaaggcccaccaagtcgacgatggttaccgggcgtgagagcgtgacccggatcactgggactgagacactgcccagacacctacgggtggctgcagtcgagaatcttcggcaatgggcgcaagcctgaccgagcgacgccgcgtgtgtgacgaaggtcttcggattgtaaagcactgtcgtgtgggaggaagtcacgttgggcaatcctggcgtgttgacctatcacaggaggaaggacgggctaagt

SEQ ID NO: 7930 - DNA, 490 bp, unidentified
  misc_feature 1..490: note = Ascusbbf_802097, encodes 16S rRNA
  source 1..490: mol_type = genomic DNA
agagtttgatcatggctcaggacgaacgctggcggcgtgcctaacacatgcaagtcgagcggggacgagggagcttgcttccgagtcctaacggcggacgggtgagtaacgcgtgagcaacctgcctttcacagggggataacgcatcgaaagatgtgctaataccgcgtaagaccacggcaccgcatggtgcaggggtcaaaggagcaatccggtgaaagatgggctcgcgtccgattagctagttggtgagataacagcccaccaaggcgacgatcggtagccgacctgagagggtgatcggccacattggaactgagaaacggtccagactcctacgggaggcagcagtggggaatattgggcaatgagcgaaagcctgacccagcaacgccgcgtgagggaagaagggcttcggctcgtaaacctctgtcctatgggacgaaagagatgacggtaccataggaggaagccccggctaactacgtgc

SEQ ID NO: 7931 - DNA, 490 bp, unidentified
  misc_feature 1..490: note = Ascusbbf_141846, encodes 16S rRNA
  source 1..490: mol_type = genomic DNA
agagtttgatcatggctcaggatgaacgctagcggcaggcctaatacatgcaagtcgcacgggagcgggccttcgggcctgcgagagtggcggacgggtgcgcaacgcgtatgcaaccaacccccgtaaggcggacagccggtggaaacgccgggcaatccgccatgacgccgccgcggggcatcccgtggcggccaaagcctggaggcggacggggacgggcatgcgtcccattagattgttggcggggtgacggcccaccaagtcatcgatgggtaggggatctgagaggacggtcccccacactggcactgagacacgggccagactcctgcgggaggcagcagtaggggatattggtcaatgggcgggagcctgaaccagccatgccgcgtgagggaatggggccctacgggtcgtgaacctcttttgcgcagggacaatgtgccgcacgtgatgcggcgttgagggtactgcgcgaataagcgcc

SEQ ID NO: 7932 - DNA, 490 bp, unidentified
  misc_feature 1..490: note = Ascusbbf_276993, encodes 16S rRNA
  source 1..490: mol_type = genomic DNA
agagtttgatcatggctcaggatgaacgctggcggcgtgcctaatacatgcaagtcgaacgaggttagcaataaccgagtggcgaacgggtgagtaacacgtaggtaacctgccttacagtttgggatacccgagggaaaccttggctaataccgaataaatcttgaagaggcatctcttcgagctaaaaggggcctttaaagcctcgctgaaagatggacctgcggcgcattagctagttggtgagataacagcccaccaaggcgaggatgcgtagccgacctgagagggtgaacggccacactggaactgagacacggtccagactcctacgggaggcagcagtagggagttttcggcaatgggggaaaccctgaccgagcaacgccgcgtgaacgatgaaggtcttcggattgtaaagttctgttatcagggaagaatgatatcgtgaggaaatgctcgatgtttgacggtacctgattagaaagcc

SEQ ID NO: 7933 - DNA, 472 bp, unidentified
  misc_feature 1..472: note = Ascusbbf_87951, encodes 16S rRNA
  source 1..472: mol_type = genomic DNA
agagtttgatcctggctcagagcgaacgctggcggcaggcttaacacatgcaagtcgaacgggcgtagcaatacgtcagtggcagacgggtgagtaacacgtgggaacgtaccctttggttcggaacaacccagggaaacttgggctaataccggatattccctcacggggaaagatttatcgccaaaggatcggcccgcgtctgattagcttgttggtgaggtaacggctcaccaaggcgacgatcagtagctggtctgagaggatgatcagccacactgggactgagacacggcccagactcctacgggaggcagcagtggggaatattggacaatgggcgaaagcctgatccagccatgccgcgtgagtgatgaaggccctagggttgtaaagctctttcagcggggaagataatgacggtacccgcagaagaagccccggctaacttcgtgccagcagccgcggtaat

SEQ ID NO: 7934 - DNA, 490 bp, unidentified
  misc_feature 1..490: note = Ascusbbf_645672, encodes 16S rRNA
  source 1..490: mol_type = genomic DNA
agagtttgatcctggctcaggatgaacgctagcggcaggcttaacacatgcaagtcgaggggtaacgggggtgcttgcacccgccgacgaccggcgcacgggtgagtaacgcgtacacaacctaccttttagcgggggatagcccagggaaacttggattaataccccatgttatcgattgttcacctggacgatcgatcaaacatttatggctaacagatgggtgtgcgtcccattagctagtaggtaaggcaacggcttacctaggcgacgatgggtaggggccctgagagggggatcccccacactggtactgagacacggaccagactcctacgggaggcagcagtgaggaatattggacaatgggggcaaccctgatccagccatgccgcgtgcaggaagacggccctatgggttgtaaactgcttttgtacaggaagaaacgttcccacgtgtgggaatttgacggtactgtaagaataaggat

SEQ ID NO: 7935 - DNA, 490 bp, unidentified
  misc_feature 1..490: note = Ascusbbf_1372901, encodes 16S rRNA
  source 1..490: mol_type = genomic DNA
agagtttgatcctggctcaggatgaacgctagcggcaggcttaacacatgcaagtcgaggggcagcgcggggtagcaatactctggcggcgaccggcggaagggtgcgtaacgcgtgagcaacttgcccgtcactgggggataggcactggaaacggtgtgtaatactccataacatatggattcacatggatttatattgaaagattcgttggtgacggatgggctcgcgtaacattagctagtcggcggtgtaccggcccaccgacgctacgatgtttaggggttctgagagtaaggtcaccacgcatgaaactgagaaacggtccagaatcctacgggaggcagcagtgaggaatattggtcaatgggcggaatcctgaacaagccatgccgagtgcaggaataaggccctatgggtcgtaaactgcttttccttgagggcaataagggtcacgagtggcccgatgagagtatcaggggaataagca

SEQ ID NO: 7936 - DNA, 490 bp, unidentified
  misc_feature 1..490: note = Ascusbbf_112697, encodes 16S rRNA
  source 1..490: mol_type = genomic DNA
agagtttgatcctggctcaggatgaacgctagcggcaggcttaacacatgcaagtcgaggggcatcgcggggtagcaatactctggcggcgaccggcgaaagggtgagtaacgcgtgagcaacatgcccggtactgggggatagtcattggaaacgatgcgtaataccccgtaacaacagagtccgcatggtctttgtttgagagattcattgataccggattggctcgcgtaccattagctagttggcggggtaacggcccaccaaggcgacgatggttaggggttctgagaggaaggtcccccacattggaactgagacacggtccagactcctacgggaggcagcagtgaggaatattggacaatggccgggaggctgatccagccatgccgcgtgcgggaggacggccctatgggttgtaaaccgcttttgtcagggagcaataaggtccacgtgtggtccgatgagagtacctggcgaataagca

SEQ ID NO: 7937 - DNA, 490 bp, unidentified
  misc_feature 1..490: note = Ascusbbf_1593851, encodes 16S rRNA
  source 1..490: mol_type = genomic DNA
agagtttgatcctggctcaggataaacgctggcggcgcacataagacatgcaagtcgaacgaacttaacctttagtttactaatggagcggttagtggcggactggtgagtaacacgtaagcaacctgcctatcagaggggaacaacagttaaaaataactgctaataccgcatatgccttgagtaacgcatgttacaaaagggaaaggagcaatccactgataaatgggcttgcgtctgattagatagttggtggggtaacggcctaccaagtcaacgatcagtagccggactaaaaaattgaacggccacattaggactgagatacggcccagactcctacgggaggcagcagtcgggaatattgcgcaatggaggaaactctgacgcagtgacgccgcgtgcaggaagaaggttttcggattgtaaactgctttagacagggaagaacaaggacagtacctgtagaataagctccggctaactacgt

SEQ ID NO: 7938 - DNA, 490 bp, unidentified
  misc_feature 1..490: note = Ascusbbf_191687, encodes 16S rRNA
  source 1..490: mol_type = genomic DNA
agagtttgatcctggctcaggatgaacgctagctacaggcttaacacatgcaagtcgaggggcagcatggagtttgcttgcaaactctgatggcgaccggcgcacgggtgcgtaacgcgtatccaaccttccccctactccggcacagcccgtcgaaaggcggattaactccggatggcgtgccttccccgcatgggggagccactaaagtttgacggtaggggatggggatgcgaccgattaggtagacggcggggcaacggcccaccgtgccttcgatcggtaggggttctgagaggaaggtcccccacactggaactgagacacggtccagactcctacgggaggcagcagtgaggaatattggtcaatgggcggaagcctgaaccagccaagtagcgtgcgggacgacggccctatgggttgtaaaccgcttttgattgggaacaaagagcgccacgcgtggcgcgttgcgtgtacctttcgaata

SEQ ID NO: 7939 - DNA, 490 bp, unidentified
  misc_feature 1..490: note = Ascusbbf_168372, encodes 16S rRNA
  source 1..490: mol_type = genomic DNA
agagtttgatcatggctcaggatgaacgctagctacaggcttaacacatgcaagtcgaggggcagcatgtatctggcttgccagatatgatggcgaccggcgcacgggtgcgtaacgcgtgttcaaccttccccatactcgggaacagcccatcgaaagatggattaatgcccgatgttgtctttcaccctcctgggtgttagaccaaagattcatcggtatgggatgggaacgcgtccgattagctggacggcggggtaacggcccaccgtggcgacgatcggtaggggttctgagaggaaggtcccccacactggaactgagacacggtccagactcctacgggaggcagcagtgaggaatattggtcaatggccgcgaggctgaaccagccaagtagcgtgaaggatgactgccctatgggttgtaaacttcttttgcaggggaataacaagtcccacgtgtgggactctgcatgtaccctgcgaat

SEQ ID NO: 7940 - DNA, 490 bp, unidentified
  misc_feature 1..490: note = Ascusbbf_257759, encodes 16S rRNA
  source 1..490: mol_type = genomic DNA
agagtttgatcatggctcaggatgaacgctggcggcgtgcctaacacatgcaagtcgagcggagataagcaccggatgaagatttatcggattccaccgcttatcttagcggcggatgggtgagtaacgcgtggataacctgccccttgcagggggataacaaccggaaacgggtgctaataccgcataggcgcgtagggccgcatggtcctaagcgtaaagatttatcggcaagggatggatccgcgtcggattaacttgttggcggggtaacggcccaccaaggtgatgatccgtagccggcctgagagggcgaccggccacattgggactgagacacggcccaaactcctacgggaggcagcagtgggggatattgcacaatggggggaaccctgatgcagcgacgccgcgtgagcgaagaagtgcttcggcatgtaaagctctatcggtggggaagaagatgacggtacccacagaagaagccccg

SEQ ID NO: 7941 - DNA, 490 bp, unidentified
  misc_feature 1..490: note = Ascusbbf_711708, encodes 16S rRNA
  source 1..490: mol_type = genomic DNA
agagtttgatcatggctcaggacgaacgctggcggcgtgcttaacacatgcaagtcgagcggtaaggctccttcgggagtacacgagcggcgaacgggtgagtaacacgtgagcaatctacccttcacatcggaataaccccgggaaactggggctaataccggatatcacttctatgggcatccatggaagttgaaagctccggcggtgagggatgagctcgcggcctatcagcttgttggtgaggtaacggctcaccaaggcaacgacgggtagccggcctgagagggtgaccggccacactgggactgagacacggcccagactcctacgggaggcagcagtggggaatattggacaatgggcgaaagcctgatccagcaacgccgcgtgagggatgacggccttcgggttgtaaacctctttcagcagggacgaagcgcaagtgacggtacctgcagaagaagcaccggccaactacgtgccagca

SEQ ID NO: 7942 - DNA, 490 bp, unidentified
  misc_feature 1..490: note = Ascusbbf_1343591, encodes 16S rRNA
  source 1..490: mol_type = genomic DNA
agagtttgatcctggctcaggatgaacgctagcggcaggcttaacacatgcaagtcgaggggcagcgcggggtagcaatatcctggcggcgaccggcggaagggtgcgtaacgcgtgagcaacttgcccgtcactggaggataggcactggaaacggtgtgtaatactccataacataagaattcgcatgagtttttattgaaagattcattggtgacggatgggctcgcgagacattagctagtcggcggggtaacggcacaccgaggctacgttgtctaggggttctgagaggaaggtcccaacacctgaaactggacaacggtccagcctcctacgggaggcagcagtgaggaatattggtcaatgggcggaagcctgaaccagccatgccgcgtgaaggaataaggccctatgggtcgtaaacttcttttccttgagggcaataaggatcacgagtggtccgatgagagtatcaggggaataagca

SEQ ID NO: 7943 - DNA, 490 bp, unidentified
  misc_feature 1..490: note = Ascusbbf_28432, encodes 16S rRNA
  source 1..490: mol_type = genomic DNA
agagtttgatcatggctcagaacgaacgctggtggcgtgtcttatacatgcaagtcgagcggcgtagcaatacgtagcggcgaacgggtgagtaacgcgtaagcaatctgccccatatcaggaaatacccgtgccaacgcgcggttaatgtccaggagagtggctccccgcatggggagttgactagagattcatcggtatgggatgagcttgcgtccgattagctagttggcggggcaacggcccaccaaggcgacgatcggtagccggcctgagagggtgatcggccacattgggactgagatacggcccagactcctacgggaggcagcagtagggaatattgcacaatggggggaaccctgatgcagcaacgccacgtgtgggaagaagcatttcggtgtgtaaaccactgtcgtgagggaataaggcccagtttaggctgggattgaatgtacctcgaaaggaagcaccggcaaacttcgtgcca

SEQ ID NO: 7944 - DNA, 490 bp, unidentified
  misc_feature 1..490: note = Ascusbbf_20756, encodes 16S rRNA
  source 1..490: mol_type = genomic DNA
agagtttgatcctggctcaggatgaacgctggcggcgtgcctaatacatgcaagtcggacgcaatgcttcggcattgagtggcgaacgggtgagtaagacataagcaacctgcccctgtgagggggataactgctggaaacggcagctaagaccgcataggcatagaggacgcatgtcgactatgttaaatatcccacgggatagcacagggatgggcttatgacgcattagccagctggtgaggtaacggctcaccagggcgacgatgcgtagccggcctgagagggtggacggccacactgggactgagacacggcccagactcctacgggaggcagcagtagggaattttcggcaatgggcgaaagcctgaccgagcaacgccgcgtgaaggaagaagtcattcgtgatgtaaacttctgttatgaaggaagaacggcagatggagggaatgccatgtgcgtgacggtacttcatgaggaagccacg

SEQ ID NO: 7945 - DNA, 489 bp, unidentified
  misc_feature 1..489: note = Ascusbbf_13545, encodes 16S rRNA
  source 1..489: mol_type = genomic DNA
agagtttgatcatggctcagaacgaacgctggcggcaggcttaacacatgcaagttgaacgggaatgttctggtagcttgctactgggacatgagagtagcgcactggtgagtaacacgtgggaacataccttttggtgggggatagcaattggaaacgattgataataccgcataagccctaagggggaaagattaattgccgaaagattggcccgcggaagattaggtagttggtggggtaagggcctaccaagcctacgatctatagctgatctgagaggatgaacagccacattggaactgagacacggtccagactcctacgggaggcagcagtgaggaatattgggcaatggaggaaactctgacccagccatgccgcgtgagtgagaaggtcttcggattgtaaagctcttttatgcaggaagatgatgacagtactgcaagaaaaagcaccggcaaacttcgtgccagcagccgcggtaat

SEQ ID NO: 7946 - DNA, 490 bp, unidentified
  misc_feature 1..490: note = Ascusbbf_13536, encodes 16S rRNA
  source 1..490: mol_type = genomic DNA
agagtttgatcatggctcaggatgaacgctagcgacaggcctaacacatgcaagtcgaggggcagcatggttgaagcttgcttcaactgatggcgaccggcgcacgggtgcgtaacgggtgtgcaatttgtcctataccaagggatagcccgctgaaaggcggattaatactttatgtgagtagggggggcatcctctttatttgaaacgtgagggtataggttgagcacgcttctgattagatagttggtagggtaacggcctaccaagtcgacgatcagtaggggtcctgagagggaggtcccccacattggaactgagacacggtccaaactcctacgggaggcagcagtgaggaatattggtcaatggacggaagtctgaaccagccaagtcgcgtgaaggaagacggttctatggattgtaaacttcttttggcagagggtaaagtgaggtacgtgtaccttattgcaagtatctgttgaataag

SEQ ID NO: 7947 - DNA, 490 bp, unidentified
  misc_feature 1..490: note = Ascusbbf_230158, encodes 16S rRNA
  source 1..490: mol_type = genomic DNA
agagtttgatcatggctcaggataaacgctggcggcgcacataagacatgcaagtcgaacggaagtcgttgtaatgattttgacatgaacagagaacttgttcgaaggaattgaagattgacttacaacaatggctttagtggcggactggtgagtaacacgtaagcaacctgcctattagaggggaataacagtgagaaatcattgctaataccgcatatgccataataaccacatggttatagtgggaaaggagtaatccgctaatagatgggcttgcgtctgattagttagttggtggggtaacggcctaccaagaccgcgatcagtagccggactgagaggttcaacggccacattgggactgagatacggcccagactcctacgggaggcagcagtcgggaatattgcgcaatggaggcaactctgacgcagtgacgccgcgtataggaagaaggttttcggattgtaaactattgtcgataggg

SEQ ID NO: 7948 - DNA, 490 bp, unidentified
  misc_feature 1..490: note = Ascusbbf_153554, encodes 16S rRNA
  source 1..490: mol_type = genomic DNA
agagtttgatcctggctcaggacgaacgctggcggcgtgcctaacacatgcaagtcgaacggagtgttgcgctgaaattgagagtagcttgctacaggaaatttcttgtaacacttagtggcggacgggtgagtaacgcgtgaggaacctgccttacagagggggacaacagttggaaacgactgctaataccgcataacgtagcgagaagacatcttcttgttaccaaaggagcaatccgctgtaagatggcctcgcgtccgattagatagttggcggggtaacggcccaccaagtcgacgatcggtagccggactgagaggttgaacggccacattgggactgagacacggcccagactcctacgggaggcagcagtgggggatattgcacaatggaggaaactctgatgcagcaacgccgcgtgagggaagaaggttttcggattgtaaacctctgtttttagtgaagaaacaaatgacggtagcta

SEQ ID NO: 7949 - DNA, 470 bp, unidentified
  misc_feature 1..470: note = Ascusbbf_409472, encodes 16S rRNA
  source 1..470: mol_type = genomic DNA
agagtttgatcatggctcagagcgaacgctggcggcaggcttaacacatgcaagtcgagcgggcccttcggggtcagcggcggacgggtgagtaacgcgtgggaacgtgccttctggttcggaataaccctgggaaactagggctaataccggatacgcccttatggggaaaggtttactgccggaagatcggcccgcgtctgattagctagttggtggggtaacggcctaccaaggcgacgatcagtagctggtctgagaggatgatcagccacactgggactgagacacggcccagactcctacgggaggcagcagtggggaatattggacaatgggcgcaagcctgatccagccatgccgcgtgagtgatgaaggccttagggttgtaaagctcttttatccgggacgataatgacggtaccggaggaataagccccggctaacttcgtgccagcagccgcggtaat

SEQ ID NO: 7950 - DNA, 490 bp, unidentified
  misc_feature 1..490: note = Ascusbbf_377634, encodes 16S rRNA
  source 1..490: mol_type = genomic DNA
agagtttgatcatggctcaggacgaacgctggcggcgtgcctaatacatgcaagtcgagcgctggagcgtttccttcgggaaacaatccggagcggcggacgggtgagtaacacgtaggcaacctgcccgtaagactgggataactaccggaaacggtagctaataccggataggtggcttcttcgcatggagaggtcaagaaacgcggagtaatctgcggcttacggatgggcctgcggcgcattagctagttggcagggtaatggcctaccaaggcgacgatgcgtagccgacctgagagggtgatcggccacactgggactgagacacggcccagactcctacgggaggcagcagtagggaatcttccgcaatgggcgaaagcctgacggagcaacgccgcgtgagtgatgaaggttttcggatcgtaaagctctgttgccaaggaagaacggcccggagggtaactactccgggagtgacggtact

SEQ ID NO: 7951 - DNA, 490 bp, unidentified
  misc_feature 1..490: note = Ascusbbf_157224, encodes 16S rRNA
  source 1..490: mol_type = genomic DNA
agagtttgatcctggctcaggatgaacgctagcggcaggcttaacacatgcaagtcgaggggcagcgcgtggtagcaataccatggcggcgaccggcgcacgggtgcgtaacgcgtatgcaacctgcctgtaacagggggataacccggagaaatttggactaataccgcatattgccaagctgcagcattgcaatttggcgaaaggagcgatccggttacagatgggcatgcgtgacattaggtagttggcggggcaacggcccaccaagccgacgatgtctaggggaactgagaggttagtcccccacactggtactgagacacggaccagactcctacgggaggcagcagtgaggaatattggtcaatggaggaaactctgaaccagccatgccgcgtgcgggaggaaggccctacgggttgtaaaccgcttttacgggggagcaataagcgccgtgcgcggcgtgatgagagtaccccgggaataa

SEQ ID NO: 7952 - DNA, 490 bp, unidentified
  misc_feature 1..490: note = Ascusbbf_244936, encodes 16S rRNA
  source 1..490: mol_type = genomic DNA
agagtttgatcatggctcagaacgaacgctggcggcgcgtcttaagcatgcaagtcgggcggcaaggatgtgcttgcacatccctagagcggcggactggtgagtaacgcgtgggtgacgcaccctccggacggggatagcctgcagaaatgcagggtaataccggatacggccgcacgggccggaaccgtgcggggaaaggagcttcggctccgccgggggagcggcctgcgtcccatcagcttgtaggcggtgtaacggaccacctaggcgatgacgggtacccggcctgagagggtgggcgggcacattgggactgagatacggcccagactcctacgggaggcagcagctaagaatattccgcaatgggcgaaagcctgacggagcgacgccgcgtggacgatgaaggccggaaggttgcagagtcctttggcacgcgaggaaggagcgggggagggaatgcccccgcggtgactgtagcgtgaga

SEQ ID NO: 7953 - DNA, 490 bp, unidentified
  misc_feature 1..490: note = Ascusbbf_710377, encodes 16S rRNA
  source 1..490: mol_type = genomic DNA
agagtttgatcctggctcaggatgaacgctggcggcacgcttaacacatgcaagtcgaacggagttcagaggagcttgcttttctgaacttagtggcggacgggtgagtaacacgtgagcaatctgcctttcagagggggatagcagttggaaacgactgataataccgcataacatatactgaccgcatgatcggtatatcaaagattttatcgctgaaagatgagctcgcgtctgattagctagttggtgaggtaacggctcaccaaggcgacgatcagtagccggactgagaggttgaacggccacattgggactgagacacggcccagactcctacgggaggcagcagtggggaatattgcacaatgggcgcaagcctgatgcagcgatgccgcgtgagggaagaaggttttcggattgtaaacctctgtcttaggggacgagaaaggacggtaccctaggaggaagctccggctaactacgtgcc

SEQ ID NO: 7954 - DNA, 490 bp, unidentified
  misc_feature 1..490: note = Ascusbbf_1571467, encodes 16S rRNA
  source 1..490: mol_type = genomic DNA
agagtttgatcatggctcaggatgaacgctggcggcgtgcctaacacattcaagtcgaacgaactgtagaaatacagtgagtggcggacgggtgagtaacgcgtaagcaacctgcctttgtgtgtggaataacaactggaaacagttgctaataccgcataacgcagagagatcgcatggtctttctgccaaagatttatcgcacaaagatgggcttgcgtccgattagatagttggcggggtaacggcccaccaagtcaacgatcggtagccggactgagaggttgaacggccacattggaactgagatacggtccagactcctacgggaggcagcagtggggaatattgggcaatggacgaaagtctgacccagcgacgccgcgtgagggaagaaggtcttcggattgtaaaccttagtcaacagggacgaagcaagtgacggtacctgtggaaagccacggctaactacgtgccagcagccgcggta

SEQ ID NO: 7955 - DNA, 490 bp, unidentified
  misc_feature 1..490: note = Ascusbbf_328511, encodes 16S rRNA
  source 1..490: mol_type = genomic DNA
agagtttgatcctggctcaggacgaacgctggcggcgtgcctaacacatgcaagtcgagcgaggtccaaccggtggcaacaccggggaagacctagcggcgaacgggtgagtaacacgtgagaaacctgccccgaacactgggataaccaggggaaaccctggctaataccggataccccctgcagatcgcatggtcagcagtggaaagaacttcggttcgggagggtctcgcggcctatcagctagttggtggggtaacggcccaccaaggcatcgacgggtagctggtctgagaggacgatcagccacactgggactgagacacggcccagactcctacgggaggcagcagtggggaatattgcgcaatgggcgaaagcctgacgcagcaacgccgcgtgcgggatgaaggccttcgggttgtaaaccgctttcggcagggacgaaattgacggtacctgcagaagaagccccggccaactacgtgcc

SEQ ID NO: 7956 - DNA, 490 bp, unidentified
  misc_feature 1..490: note = Ascusbbf_272604, encodes 16S rRNA
  source 1..490: mol_type = genomic DNA
agagtttgatcctggctcaggatgaacgctagcggcaggcctaatacatgcaagtcggacggtatttccctttcgggggagagagagtggcgcacgggtgcgtaacgcgtatgcaacctgccccttacagggggatagcccggggaaacccggattaataccccatgttccgtgtttccggcatcggaggtacggcaaaggcttcggccggtaagggatgggcatgcgtaggattagcttgttggcggtgtaacggaccaccaaggcgacgatccttaggggttctgagaggaaggtcccccacactggcactgagatacgggccagactcctacgggaggcagcagtagggaatattgggcaatgggcggtagcctgacccagccatgccgcgtgcaggaagacggcgttctgcgttgtaaactgcttttatacgggaagaaaaggcccatgcgtgggacattgccggtaccgtatgaataagcaccgg

SEQ ID NO: 7957 - DNA, 490 bp, unidentified
  misc_feature 1..490: note = Ascusbbf_218090, encodes 16S rRNA
  source 1..490: mol_type = genomic DNA
agagtttgatcctggctcaggacgaacgctggcggcgtgcctaatacatgcaagtagaacgctgaaggagggagcttgcttcttctggatgagttgcgaacgggtgagtaacgcgtaggtaacctgcctgatagcgggggataactattggaaacgatagctaataccgcataagaggtaataacacatgttattggtttaaaaggggcaactgctccactatcagatggacctgcgttgtattagctagttggtaaggtaacggcttaccaaggcgacgatacatagccgacctgagagggtgatcggccacactgggactgagacacggcccagactcctacgggaggcagcagtagggaatcttcggcaatgggggcaaccctgaccgagcaacgccgcgtgagtgaagaaggttttcggatcgtaaagctctgttgtaagagaagaacggatgtgggagtggaaaatccatgtcgtgacggtatct

SEQ ID NO: 7958 - DNA, 490 bp, unidentified
  misc_feature 1..490: note = Ascusbbf_305697, encodes 16S rRNA
  source 1..490: mol_type = genomic DNA
agagtttgatcctggctcaggacgaacgctggcggcgtgcttaaaacatgcaagtcgaacggagattttagggagcttgcttcttgaaatcttagtggcggacgggtgagtaacacgtgagcaacctgcctatcacagggggataacacttagaaataggtgctaataccgcatatgaccacagaccggcatcggtcagaggtgaaaggagttaaatctggtgatagaggggcttgcgtatcattagctagttggtgaggtaacggcccaccaaggccacgatgattagccgatctgagaggatgaccggccacattggaactgagatacggtccagactcctacgggaggcagcagttaggaatattgggcaatggaggaaactctgacccagcaacgccgcgtgaaggatgaaggttttcggattgtaaacttctgatctgtggaaagaaaaaaatgacggtaccacaggagcaagccccggctaact

SEQ ID NO: 7959 - DNA, 490 bp, unidentified
  misc_feature 1..490: note = Ascusbbf_399798, encodes 16S rRNA
  source 1..490: mol_type = genomic DNA
agagtttgatcatggctcaggacgaacgctggcggcgtgcttaacacatgcaagtcgagcggggacaatggaagagcttgctcggaaattgttctagcggcggacgggtgagtaacgcgtgagcaatctgtcccagacagggggataacagatggaaacatctgctaataccgcataagaccactttctggcatcaggaaggggtaaaaggaggaatccggtttggggtgagctcgcgtccgattagctagttggcgaggtaacggcccaccaaggcgacgatcggtagccgacctgagagggtgaacggccacattggaactgagaaacggtccaaactcctacgggaggcagcagtggggaatattgggcaatgggcgaaagcctgacccagcaacgccgcgtgagggaagaaggttttcggattgtaaacctctatcgtggaggacgaaggaagtgacggtactccacaaggaagccccggctaact

SEQ ID NO: 7960 - DNA, 490 bp, unidentified
  misc_feature 1..490: note = Ascusbbf_386603, encodes 16S rRNA
  source 1..490: mol_type = genomic DNA
agagtttgatcctggctcaggatgaacgctagcggcaggcttaacacatgcaagtcgaggggcagcgggtccagcaatggatgccggcgaccggcgcaagggtgcgtaacgcgtgagcgacatgcccgtgaccgggggataaccgatggaaacgtcgcctaatcccgcataacacattcagctgcatggctgaatgttgaaaactcaggtggtcacggattggctcgcgtatcattagctagtcggcggggtaacggcccaccgaggctacgatgattaggggttctgagaggaaggtcccccacaatggaactgagacacggtccatactcctacgggaggcagcagtgaggaatattggtcaatgggcggaagcctgaaccagccatgccgcgtgcgggatgacggccctatgggttgtaaaccgcttttgagagggagcaataaggatctcgagcaggtctgatgagagtacctttcgaataagcat

SEQ ID NO: 7961 - DNA, 490 bp, unidentified
  misc_feature 1..490: note = Ascusbbf_231704, encodes 16S rRNA
  source 1..490: mol_type = genomic DNA
agagtttgatcctggctcaggacgaacgctggcggcgtgcctaacacatgcaagtcgaacgaggtatatttttcggaatatacttagtggcggacgggtgagtaacgcgtgaacaatctgccctgtacaaaggaatagcctcgggaaaccgggattaaaaccgtataacactttagtatcgcatgatacagaagtcaaatatttataggtatgggatgagttcgcgtctgattagctagttggtaaggtaatggcttaccaaggcgacgatcagtagccggcctgagagggtgaacggccacactggaactgagacacggtccagactcctacgggaggcagcagtggggaatattgcacaatggaggaaactctgatgcagcgacgccgcgtgagtgaagaaggtcttcggatcgtaaaactctgtccttggtgaagataatgacggtagccaaggaggaagccccggctaactacgtgccagcagccg

SEQ ID NO: 7962 - DNA, 490 bp, unidentified
  misc_feature 1..490: note = Ascusbbf_318947, encodes 16S rRNA
  source 1..490: mol_type = genomic DNA
agagtttgatcatggctcaggatcaacgctggcggcgtgcctaatgcatgcaagtcgaacggggtgaccttcgggtcactcacgtggcggacgggtgaggaacacgtgggtaacctgcccagtggtggggggtagccctcggaaacgaggggtaattccgcatacgcttgctgaccttgtggggtgagtaaggaaaggccttcgggtcgccactggaggggcctgcgaccgattagctagctggtggggtaatggcctaccagggcgacgatcggtagctggtttgaggggatgatcagccacacggggactgagacacggccccgactcctacgggaggcagcagcaaggaattttccgcaatgggcgaaagcctgacggagcaacgccgcgtgcgggatgacgcttttcggagtgtaaaccgctgttcatggggacgaagcactgacggtacccatggaggaaggcccggctaactacgtgccagcag

SEQ ID NO: 7963 - DNA, 490 bp, unidentified
  misc_feature 1..490: note = Ascusbbf_990593, encodes 16S rRNA
  source 1..490: mol_type = genomic DNA
agagtttgatcctggctcagattgaacgctggcggcatgcttaacacatgcaagtcgaacggcagcactatttagtttactagagaggtggcgagtggcgaacgggtgagtaacgcgtaggaatataccttgaagagtgggacaacttggggaaactcaagctaataccgcatatactctacggaggaaagctggggaccgcaaggcctggcgctttaagaatagcctgcgtccgattagctagttggtggggtaaaggcctaccaaggcgacgatcggtagctggtctgagaggatgatcagccacactggaactgagacacggtccagactcctacgggaggcagcagtggggaatattggacaatggggggaaccctgatccagcaatgccgcgtgtgtgaagaaggcctgagggttgtaaagcactttcggtggggaggaggttatataggttaagagctaatatgatggacgttacccacataag

SEQ ID NO: 7964 - DNA, 490 bp, unidentified
  misc_feature 1..490: note = Ascusbbf_23869, encodes 16S rRNA
  source 1..490: mol_type = genomic DNA
agagtttgatcatggctcaggacgaacgctggcggcgtgcttaacacatgcaagtcgaacgaggttaatgtgaggaagtcttcggatggaatcgtgttaaccgagtggcggacgggtgagtaacgcgtgagcaacctgtcttctacagggggataacactccgaaaggagcgctaataccgcataagaccacggtttcgcatgggactgaggtcaaaggagcaatccggtagaaggtgggctcgcgtcccattagatagttggtgaggtaacggctcaccaagtcgacgatgggtagccgacctgagagggtgatcggccacattggaactgagatacggtccagactcctacgggaggcagcagtggggaatattgggcaatgggcgaaagcctgacccagcaacgccgcgtgagggaagaaggtcttcgggttgtaaacctctgtccttggtgaaaaggaaggatggtagccaaggaggaagccccgg

SEQ ID NO: 7965 - DNA, 490 bp, unidentified
  misc_feature 1..490: note = Ascusbbf_67816, encodes 16S rRNA
  source 1..490: mol_type = genomic DNA
agagtttgatcatggctcaggacgaacgctggcggtgtgcctcatacatgcaagtcgaacgataaggttccttcgggaatacataagtggcggacgggtgagtacaacataggaaatctgccctaaagcgggggacaacagagggaaacttctgctaataccccatatgagcttagttgaaatactaatcttgaaagatttatcactttaggatgagcctgtgcctgattagctagttggtggtgtaatggactaccaaggcgacgatcagtagctggtttgagaggatgatcagccacaatgggactgagacacggcccatactcctacgggaggcagcagtagggaattttgcgcaatgggggaaaccctgacgcagcaacaccgcgtgaatgttaagcccttcggggtgtaaagttctgtcagtagggaagaacaaatgactgtacctacaaaggaagcaccggctaactccgtgccagcagccgcg

SEQ ID NO: 7966 - DNA, 490 bp, unidentified
  misc_feature 1..490: note = Ascusbbf_354237, encodes 16S rRNA
  source 1..490: mol_type = genomic DNA
agagtttgatcatggctcaggacgaacgctggcggcgtgcctaatacatgcaagtcgagcgcttgcacaagaaagcttgctttcttgttgcttgagcggcggacgggtgagtaacacgtgggcaacctgcctataagactgggataacttcgggaaaccggagctaataccggataatgcttttgaacacatgttcgaaagcggaaagatggtttcggctatcacttatagatgggcccgcggcgcattagctagttggtgaggtaacggctcaccaaggcgacgatgcgtagccgacctgagagggtgatcggccacactgggactgagacacggcccagactcctacgggaggcagcagtagggaatcttccgcaatggacgaaagtctgacggagcaacgccgcgtgagtgatgaaggttttcggatcgtaaaactctgttgttagggaagaacaagtatcggagtaactgccggtaccttgacggt

SEQ ID NO: 7967 - DNA, 490 bp, unidentified
  misc_feature 1..490: note = Ascusbbf_370049, encodes 16S rRNA
  source 1..490: mol_type = genomic DNA
agagtttgatcctggctcaggatgaacgctggcggcgtgcctaacacatgcaagtcgaacggagtaccaccggactgagattcgtcgaaggaaggtgactacttagtggcggacgggtgagtaacgcgtgggtaacctgcctcatagagggggacaacagttggaaacgattgctaataccgcataagcccccggtaccgcatggtacagagggaaaagattcatcgctatgagatggacccgcgttagattagccagttggcggggtaacggcccaccaaagcaacgatctatagccggactgagaggttgaacggccacattgggactgagacacggcccaaactcctacgggaggcagcagtggggaatattgcacaatgggggaaaccctgatgcagcgacgccgcgtgagtgaagaagtatttcggtatgtaaagctctatcagcagggaagaaaaaggacggtacctgactaagaagccccggc

SEQ ID NO: 7968 - DNA, 467 bp, unidentified
  misc_feature 1..467: note = Ascusbbf_636902, encodes 16S rRNA
  source 1..467: mol_type = genomic DNA
agatttgatcctggctcagaacgaacgctggcggcaggcttaacacatgcaagtcgagcgccccgcaaggggagcggcagacgggtgagtaacgcgtgggaatctaccttttgctacggaataactcagggaaacttgtgctaataccgtatgtgtccttcgggagaaagatttatcggcaagagatgagcccgcgttggattagctagttggtggggtaaagtcctaccaaggcgacgatccatagctggtctgagaggatgatcagccacactgggactgagacacggcccagactcctacgggaggcagcagtggggaatattggacaatgggcgcaagcctgatccagccatgccgcgtgagtgatgacggtcttaggattgtaaagctctttcaccggtgaagataatgacggtaaccggagaagaagccccggctaacttcgtgccagcagccgcggtaat

SEQ ID NO: 7969 - DNA, 490 bp, unidentified
  misc_feature 1..490: note = Ascusbbf_1808403, encodes 16S rRNA
  source 1..490: mol_type = genomic DNA
agagtttgatcatggctcagaacgaacgctggcggcgcgttttaagcatgcaagtcgagcggtagcagcaatgcgagagcggcggacgggtgagtaacacgtgggtaatctgccctccggtcgggaatagcctgtggaaacacaagataataccggatgcgatggtttttgcacaagcagagatcaggaaaggagccaaggctccgccggaggatgagcccgcgtcccattagctagatggtgaggtaaaggcccaccatggcgatgggtagccggcctgagagggtgaacggccacattggaactgagacacggtccagactcctacgggaggcagcagctaagaatcttccacaatggacgaaagtctgatggagcgacgccgcgtgggcgatgaaggccgtgaggttgtaaagcccttttcttgagggggaataaagcgggcagggaatggcccgctgatgacgtgaatcaaggaataagccccggc

SEQ ID NO: 7970 - DNA, 490 bp, unidentified
  misc_feature 1..490: note = Ascusbbf_18857, encodes 16S rRNA
  source 1..490: mol_type = genomic DNA
agagtttgatcatggctcagaacgaacgctggcggcgcgtcttaagcatgcaagtcgaacggcaagatggtagcttgctactatcctagagtggcggactggtgagtaacacgtgggtgacgtacccttcagacggggatagctggtagaaatatcagataataccggatacgattctgcaggttagagctgcagaaggaaaggagctatggcttcgctgaaggaacggcctgcgacccatcagctggttggtgaggtaaaggcccaccaaggcaatgacgggtatccggccttagagggtgaacggacacattgggactgagatacggcccagactcctacgggaggcagcagctaagaatattccgcaatggacgaaagtctgacggagcgacgccgcgtggatgatgaaggccggaaggttgtaaaatccttttaaaaccgaggaataagctaaagagggaatgctttagcggtgactgtaagtttt

SEQ ID NO: 7971 - DNA, 490 bp, unidentified
  misc_feature 1..490: note = Ascusbbf_1203367, encodes 16S rRNA
  source 1..490: mol_type = genomic DNA
agagtttgatcctggctcaggacgaacgctggcggcgtgcctaacacatgcaagtcgtacgagaatttagcgaaagattccttcgggatgaaattattagaggaaagtggcggacgggcgagtaacgcgtgaataacctgcccataagagggggataatccgtggaaacgcggactaataccgcatattgagtaataaccgcatggtaaatacttgaaagatttatcgcttatggatggattcgcgtcagattagatagttggagaggtaacggctcaccaagtcaacgatctgtagccgaactgagaggttgatcggccgcattgggactgagacacggcccagactcctacgggaggcagcagtggggaatattgcgcaatggggggaaccctgacgcagcaacgccgcgtgcaggaagaaggtcttcggattgtaaactgttgtcgcaagggaagaaaaagatgacggtaccttgtgagaaagtcac

SEQ ID NO: 7972 - DNA, 490 bp, unidentified
  misc_feature 1..490: note = Ascusbbf_73690, encodes 16S rRNA
  source 1..490: mol_type = genomic DNA
agagtttgatcctggctcaggacgaacgctggcggcatgcctaacacatgcaagtcgaacggagtttttcccttcgggggaagacttagtggcgaacgggtgagtaacgcgtgagcaacctgccttggcgagggggataacacttggaaacaggtgctaataccgcataagaccacacttccgcatgggagaggggtcaaaggagcaatccgcgctgagaggggctcgcgtcccattaggtagatggcggggcaacggcccaccatgccgacgatgggtagccgagctgagaggctgatcggccacactggaactgagacacggtccagactcctacgggaggcagcagtggggaatattgggcaatgggcgaaagcctgacccagcaatgccgcgtgagggatgaaggtcttcggattgtaaacctctgtccttggtgacgaaggaagtgacggtagccaaggaggaagccccggctaactacgtgcca

SEQ ID NO: 7973 - DNA, 490 bp, unidentified
  misc_feature 1..490: note = Ascusbbf_32640, encodes 16S rRNA
  source 1..490: mol_type = genomic DNA
agagtttgatcatggctcaggatgaacgctggcggcgtgcttaacacatgcaagtcgaacgaagcatttatctttgatgttttcggactgaaaagatttatgacttagtggcggacgggtgagtaacgcgtgggcaacctgccgtatgcagggggacaacagttggaaacgactgctaataccgcataagcgcacactggcacatgccggagtgtgaaaagatttatcggcatacgatgggcccgcgttggattaggttgttggtgaggtaacggcccaccaagcctacgatccatagccgacctgagagggtgaccggccacattgggactgagacacggcccaaactcctacgggaggcagcagtggggaatattgcacaatgggggaaaccctgatgcagcgacgccgcgtgagtgaagaagtatttcggtatgtaaagctctatcagcagggaagaaaatgacggtacctgcataagaagccccgg

SEQ ID NO: 7974 - DNA, 490 bp, unidentified
  misc_feature 1..490: note = Ascusbbf_45536, encodes 16S rRNA
  source 1..490: mol_type = genomic DNA
agagtttgatcctggctcaggatgaacgctggcggcgtgcttaacacatgcaagtcgaacggggaagcataacggaagttttcggatggaagatatgctttctagtggcggacgggtgagtaacgcgtaaacaatctgccttgaagagggggataacagatagaaatatttgctaataccgcataagaccacagtggggcatcccacaggggtcaaaggagcaatccgcttcaagatgagtttgcgtactattagctagttggtgaggtaacggcccaccaaggcaacgatggttagccggcctgagagggtgaacggccacattggaactgagatacggtccagactcctacgggaggcagcagtgaggaatattgggcaatgggcgaaagcctgacccagcaacgccgcgtggaggaagaaggtcttcggattgtaaacttctgttatgggggaaaaagaaagtgatggtaccccatgagaaagctac

SEQ ID NO: 7975 - DNA, 490 bp, unidentified
  misc_feature 1..490: note = Ascusbbf_923547, encodes 16S rRNA
  source 1..490: mol_type = genomic DNA
agagtttgatcatggctcaggatgaacgctggcggcgtgcctaacacatgcaagtcgaacggagatcatttggaaataagcttcggcagaaagaaggatgatcttagtggcggacgggtgagtaacgcgtggagaacctgccctgtacagggggataacatccagaaatggatgctaaaaccgcataagcgcacagagtcgcatgactcagtgtgaaaaactccggtggtacaggatggctccgcgttggattagccagttggcggggtaacggcccaccaaagcgacgatccatagccggcctgagagggtggacggccacattgggactgagacacggcccagactcctacgggaggcagcagtggggaatattgcacaatggggggaaccctgatgcagcgacgccgcgtgaaggaagaagtatttcggtatgtaaacttctatcagcagggaagaaaatgacggtacctgactaagaagccccggc

SEQ ID NO: 7976 - DNA, 490 bp, unidentified
  misc_feature 1..490: note = Ascusbbf_602323, encodes 16S rRNA
  source 1..490: mol_type = genomic DNA
agagtttgatcatggctcaggacgaacgctagcggcgtgcttcatacatgcaagtcgaacgagaatccggtgcttgcaccggaggaaagtggcggacgggtgagtaaaatgtagagaatctgccttcaagcgggggatagcagttggaaacgactattaataccccatatgcgcgtagctgagatgctattcgtgaaaattccggtgcttggagatgagtctgcatctgattagctagttgggggtgtaatggaccaccaaggcgacgatcagtagctggtttgagaggatgatcagccacaatgggactgagacacggcccatactcctacgggaggcagcagtagggaattttgcgcaatgggcgaaagcctgacgcagcaacgccgcgtgatcgagacgcccttcggggtgtaaagatctgtcagtggggacgaacgatgacggtacccacagaggaagcaccggctaactccgtgccagcagccgc

SEQ ID NO: 7977 - DNA, 490 bp, unidentified
  misc_feature 1..490: note = Ascusbbf_1486622, encodes 16S rRNA
  source 1..490: mol_type = genomic DNA
agagtttgatcctggctcaggatgaacgctggcggcgtgcgtaacacatgcaagttgagcgacgacgtgcttgaagtggcgacatggagggcgcgagcggagcagcggacgggtgagtacaacatgagaagctgtcctgtggcgggggacaacgtctagaaatggacgctaataccccatagtccgagaggttaaagcagcaatgcaccacaggaggcgctcgtgccctatcagctagttggcgaggtaacggctcaccaaggcgacgacgggtagccggcctgagagggtgtccggccacactgggactgagatacggcccagactcctacgggaggcagcagtggggaatattgggcaatgggagaaatcctgacctagcgacgccgcgtgaacgaagaaggccttcgggtcgtaaagttcttttatgcgggaagaaggaagtgacggtaccgcatgaataagccccggctaactacgtgccagcagc

SEQ ID NO: 7978 - DNA, 490 bp, unidentified
  misc_feature 1..490: note = Ascusbbf_292557, encodes 16S rRNA
  source 1..490: mol_type = genomic DNA
agagtttgatcctggctcagagcgaacgctagcggaatgctttatacatgcaagtcgaacgaatgagtttatattgagtagcaatacgatttataaatgagttagtggcgaacgggtgagtaatagataggaacttgccgagtagtgggggacaacagatagaaatgtctgctaataccgcatacgcccgagaggggaaagatttatcgctatttgagaggcctattcacgattagcttgttggtgagataaaagcccaccaaggcgacgatcgttagccggtcttagaggacgatcggccacattgggactgagacacggcccagactcctacgggaggcagcagtagggaatattggacaatggaggcaactctgatccagcaattccgcgtgagtgatgaaggtgttatgcattgtaaaactcttttgcctgtgaagataatgacggtaacaggagaataagcaccgactaactatgtgccagcagc

SEQ ID NO: 7979 - DNA, 490 bp, unidentified
  misc_feature 1..490: note = Ascusbbf_344479, encodes 16S rRNA
  source 1..490: mol_type = genomic DNA
agagtttgatcctggctcaggacgaacgctggcggcgtgcctaacacatgcaagtcgaacgggggagtggagcttgctccacttcttagtggcggacgggtgagtaacgcgtgagcaacctgcctatcagagggggatagcctggggaaacctaggataataccgcatataatatagtgattgcatgattgctatatgaaaggagtaatccgctgatagatgggctcgcgtccgattagccagttggtgaggtaacggctcaccaaagcgacgatcggtaaccgggctgagaggctgaacggtcacattggaactgagacacggtccagactcctacgggaggcagcagtgggggatattgcacaatggggggaaccctgatgcagcaacgccgcgtgagggaagaaggttttcggattgtaaacctctgtccttagagaagaaaagaatgacggtatctgaggaggaagctccggctaactacgtgcca

SEQ ID NO: 7980 - DNA, 490 bp, unidentified
  misc_feature 1..490: note = Ascusbbf_1456659, encodes 16S rRNA
  source 1..490: mol_type = genomic DNA
agagtttgatcatggctcaggacgaacgctggcggcacgcctaacacatgcaagtcgaacggacgagagagagcttgctctttcaagttagtggcggacgggtgagtaacacgtgagcaacctacctttaagagagggatagcttctggaaacggatggtaataccacataacacattgataccgcatgatattagtgtcaaagatttatcgcttagagatgggctcgcgtctgattagatagttggtgaggtaacggctcaccaagtcgacgatcagtagccggactgagaggttgaacggccacattgggactgagacacggcccagactcctacgggaggcagcagtggggagtattgcacaatgggggaaaccccggtgcagcgatgccgcgtggaggaagaaggttttcggattgtaaactccttttgtcagggaagataatgactgtacctgacgaataagctccggctaactacgtgccagca

SEQ ID NO: 7981 - DNA, 490 bp, unidentified
  misc_feature 1..490: note = Ascusbbf_285476, encodes 16S rRNA
  source 1..490: mol_type = genomic DNA
agagtttgatcatggctcaggacgaacgctggcggcgcgcttaaaacatgcaagtcgaacggagtcttttggattcgtctgaaagacttagtggcgaacgggtgagtaacacgtgaggaacctgccctttacagggggataacacttagaaataggtgctaataccgcataagaccacagaaccgcatggttccggggtcaaaggagcaatccggtaaaggatggcctcgcgtccgattagctggttggcggggtaacggcccaccaaggcgacgatcggtagccggactgagaggttggacggccacattgggactgagacacggcccagactcctacgggaggcagcagttgggaatattgcacaatgggcgaaagcctgatgcagcgacgccgcgtgagggaagaaggttttcggattgtaaacctctgttccgggggacgaagaaatgacggtaccctggaaggaagctacggctaactacgtgcc

SEQ ID NO: 7982 - DNA, 490 bp, unidentified
  misc_feature 1..490: note = Ascusbbf_443772, encodes 16S rRNA
  source 1..490: mol_type = genomic DNA
agagtttgatcatggctcagattgaacgctggcggcaggcctaacacatgcaagtcgagcggcagcgggaaagtagcttgctacttttgccggcgagcggcggacgggtgagtaatgcctgggaaattgcccagtcgagggggataacagttggaaacgactgctaataccgcatacgccctacgggggaaagcaggggaccttcgggccttgcgcgattggatatgcccaggtgggattagctagttggtgaggtaatggctcaccaaggcgacgatccctagctggtctgagaggatgatcagccacactggaactgagacacggtccagactcctacgggaggcagcagtggggaatattgcacaatgggggaaaccctgatgcagccatgccgcgtgtgtgaagaaggccttcgggttgtaaagcactttcagcgaggaggaaaggtcagtagctaatacctgctggctgtgacgttactcgcaga

SEQ ID NO: 7983 - DNA, 490 bp, unidentified
  misc_feature 1..490: note = Ascusbbf_762264, encodes 16S rRNA
  source 1..490: mol_type = genomic DNA
agagtttgatcctggctcagaacgaacgctggtggcgtgttttatacatgcaagtcgagcgaggacagtagcttgctactgagccgagcggcgaacgggtgagtaacgcgtaagcaatctgccccacaatcgggaacaaccgtgccaacgcgcggctaatgccggatattgtgtcctactgcatagtaggttaacgaaagatttatcgttgtgggatgagcttgcgtccgattagctagttggcggggtaatagcccaccaaggcgacgatcggtagccggcctgagagggtgatcggccacattgggactgagatacggcccagactcctacgggaggcagcagtagggaatattgcgcaatggggggaaccctgacgcagcaacgccacgtgtgggaagaagcatttcggtgtgtaaaccactgtcggaaaggaataacggaagacttcggtctttatgaatgtacttttagaggaagcaccggcaaa

SEQ ID NO: 7984 - DNA, 490 bp, unidentified
  misc_feature 1..490: note = Ascusbbf_1103137, encodes 16S rRNA
  source 1..490: mol_type = genomic DNA
agagtttgatcatggctcaggatgaacgctagcgacaggcttaacacatgcaagtcgaggggcagcgtggcggcagcaatgccgccgacggcgaccggcgcactggtgagtaacacgtatgcaacctgccccccacagggggacaatccagagaaatttggtctaataccgcataagaggccgaggggcatcccccggccttgaaagctaatttgcggtgggggatgggcatgcggcgcattagctggttggcggggtgacggcccaccaaggcgacgatgcgtaggggttctgagaggaaggtcccccacactggtactgagacacggaccagactcctacgggaggcagcagtgaggaatattggtcaatggacggaagtctgaaccagccaagtcgcgtgagggaggaaggtccttcggattgtaaacctcttttgccggggagtaaccgggcggacttgtccgtccctgagagtacccggagaaaa

SEQ ID NO: 7985 - DNA, 490 bp, unidentified
  misc_feature 1..490: note = Ascusbbf_12979, encodes 16S rRNA
  source 1..490: mol_type = genomic DNA
agagtttgatcatggctcaggacgaacgctggcggcgtgcttaacacatgcaagtcgaacgaggatcaaggagagcttgcttgaattgattcgagtggcggacgggtgagtaacgcgtgaacaatctgtctcacacaggggaataacgcatcgaaagatgtgctaataccgcataggaccacggtttcgcatgggactgaggtgaaaggagcaatccggtgtgaggtgagttcgcgtctgattagatagttggtgaggtaacggcccaccaagtcaacgatcagtagccgacctgagagggtgatcggccacattgggactgagacacggcccagactcctacgggaggcagcagtggggaatattgggcaatgggcgcaagcctgacccagcaacgccgcgtgaaggaagaaggttttcggatcgtaaacttctgtccttggtgaagaggagtagacggtagccaaggaggaagccccggctaactacg

SEQ ID NO: 7986 - DNA, 490 bp, unidentified
  misc_feature 1..490: note = Ascusbbf_24084, encodes 16S rRNA
  source 1..490: mol_type = genomic DNA
agagtttgatcatggctcaggacgaacgctggcggcgtgcttcatacatgcaagtcgaacgagaagccgacttcggttggtagaaagtggcggacgggtgagtaaaatgtagagaatctgcctcaaagtgggggacaacagagggaaacttctgctaataccgcatatgcgcgtagttgagatgctattcgtgaaaactccggtgctttgagatgagtctgcatctgattagctagttgggggtgtaatggaccaccaaggcgacgatcagtagctggtttgagaggatgatcagccacaatgggactgagacacggcccatactcctacgggaggcagcagtagggaattttgcgcaatgggggaaaccctgacgcagcaacgccgcgtgaacgatgaagcccttcggggtgtaaagttctgtcagtggggacgaaacttgacggtacccacagaggaagcaccggctaactccgtgccagcagccgcg

SEQ ID NO: 7987 - DNA, 490 bp, unidentified
  misc_feature 1..490: note = Ascusbbf_170480, encodes 16S rRNA
  source 1..490: mol_type = genomic DNA
agagtttgatcatggctcaggatgaacgctggcggcgtgcctaacacatgcaagtcgagcgggaaatcctcaaagaaagcttcggcagactgagaggatggatagcggcggacgggtgagtaacgcgtaggtaagctgccccatgcacagggatagcctcgggaaactgggattaatacctgatgacaccgcgcattcacatggatatgcggtcaaagatttatcggcatgggatgcacctgcgtctgattagctagttggcagggtaacggcctaccaaggcaacgatcagtagccgacctgagagggtaatcggccacattggaactgagacacggtccaaactcctacgggaggcagcagtggggaatattgcacaatgggcgcaagcctgatgcagcaacgccgcgtgagcgatgaaggtcttcggatcgtaaagctctgtccttggggacgaaggaagtgacggtacccaaggaggaagccccgg

SEQ ID NO: 7988 - DNA, 490 bp, unidentified
  misc_feature 1..490: note = Ascusbbf_1373486, encodes 16S rRNA
  source 1..490: mol_type = genomic DNA
agagtttgatcatggctcagaacgaacgctggcggcatggattaggcatgcaagtcgtgcgcgaaagcggccttcgggctgttagtagagcggcgaactggtgagtacaaggtgactaacctgcccttaagtgggggataacttccggaaacgggagctaataccgcatggtctctgcgatttacggattgtcgagtaaagcatttatgcgcttaaggatggggtcaccccccattagctagttggtagggtaacggcctaccaaggctacgatgggtagctggactgagaggttggccagccacactgggactgagatacggcccagactcctacggggggcagcagtctagaggcttcgacaatgcccgaaagggtgatcgagcgatgccgcgtgcgggatgaaggtcttcggattgtaaaccgcttttatctgggaagaacgcctgtctcgtgaagataggtttgacggtaccagaggaataagccc

SEQ ID NO: 7989 - DNA, 490 bp, unidentified
  misc_feature 1..490: note = Ascusbbf_176731, encodes 16S rRNA
  source 1..490: mol_type = genomic DNA
agagtttgatcctggctcaggatcaacgctggcggcgtgcctaatgcatgcaagtcgaacggggtcaccttcgggtggctcacgtggcggacgggtgaggaacacgtggggaatctgccgcacgctcgggggtagcccgcggaaacgcggggtaattccggatggactgggggcccgggtaggggtcgtcaggaaaggccttcgggtcggcgtgtgaggagcctgcgtccgattagctggttggtggggtaacggcctaccaaggcgatgatcggtagctggtctgagaggatgatcagccacacggggactgagacacggccccgactcctacgggaggcagcagcaaggaattttccgcaatgggcgcaagcctgacggagcaacgccgcgtgcgggatgacgcctttcggggtgtaaaccgctgttcgtggggacgaagcactgacggtacccacggaggaaggcccggctaactacgtgccagcag

SEQ ID NO: 7990 - DNA, 490 bp, unidentified
  misc_feature 1..490: note = Ascusbbf_78188, encodes 16S rRNA
  source 1..490: mol_type = genomic DNA
agagtttgatcctggctcagattgaacgctggcggcaggcttaacacatgcaagtcgagcggatgaaagtagcttgctactgaattcagcggcggacgggtgagtaatgcttaggaatctgcccattaatgggggacaacagttggaaacgactgctaataccgcatacgccctacgggggaaagcaggggatcttcggaccttgcgttaatggatgagcctaagtcggattagctagttggtggggtaaaggcctaccaaggcgacgatctgtagcgggtctgagaggatgatccgccacactgggactgagacacggcccagactcctacgggaggcagcagtggggaatattggacaatgggcgaaagcctgatccagccatgccgcgtgtgtgaagaaggccttttggttgtaaagcactttaagcgaggaggaggctccctagattaatactctaggtgagtggacgttactcgcagaataagca

SEQ ID NO: 7991 - DNA, 490 bp, unidentified
  misc_feature 1..490: note = Ascusbbf_49738, encodes 16S rRNA
  source 1..490: mol_type = genomic DNA
agagtttgatcatggctcaggattaacgctggcggcgtgcctaatacatgcaagtcgaatggtagtagcaatacaaaccatggcgaacgggtgagtaacacgtaggcaacctgactttaagacgaggataaccgttggaaacgacggataatactggataggacatcggaaggggcatccctggatgtttaaagattataatgtcacttagagaggggcctgcggcgcattagctagttggtgagataacagcccaccaaggcgatgatgcgtagccggactgagaggttgaacggccacaatggaactgagaacggtccatactcctacgggaggcagcagtagggaattttcggcaatgggcgcaagcctgaccgagcaacgccgcgtgaacgaagaagttattcgtaatgtaaagttcttttatctgggaagaaaaaacaaattgacggtaccagatgaataagctccggctaactacgtgccagca

SEQ ID NO: 7992 - DNA, 490 bp, unidentified
  misc_feature 1..490: note = Ascusbbf_62241, encodes 16S rRNA
  source 1..490: mol_type = genomic DNA
agagtttgatcatggctcaggatgaacgctggcggcgtgcttaacacatgcaagtcgaacgaagcacctttaaccgaagattgacgtagcttgctactgattgattcatcttaaggtgactgagtggcggacgggtgagtaacgcgtgggtaacctaccctatacagggggataacagttggaaacgactgctaataccgcataagcgcacagtatcgcatgatacagtgtgaaaaactccggtggtataggatggacccgcgtctgattagctagttggtgaggtaacggctcaccaaggcaacgatcagtagccgacctgagagggtgaccggccacattgggactgagacacggcccaaactcctacgggaggcagcagtggggaatattgcacaatgggcgaaagcctgatgcagcgacgccgcgtgaacgatgaagtatttcggtatgtaaagttctatcagcagggaagaataatgacggtacc

SEQ ID NO: 7993 - DNA, 490 bp, unidentified
  misc_feature 1..490: note = Ascusbbf_1485057, encodes 16S rRNA
  source 1..490: mol_type = genomic DNA
agagtttgatcctggctcaggatgaacgctagcgacaggcttaacacatgcaagtcgaggggcagcgggtcagagtgcttgcactttgatgccggcgaccggcgcacgggtgagtaacacgtatgcaacctgcccgggacagacggataaccggaagaaattccgactaatacggcatgacaccccgaggggacatccccttggagttaaaggaagtaattccggtcccggatgggcatgcggcgcattaggcagttggcggggtaacggcccaccaaaccgacgatgcgtaggggttctgagaggaaggtcccccacattggaactgagacacggtccaaactcctacgggaggcagcagtgaggaatattggtcaatggccggaaggctgaaccagccaagtcgcgtgagggactaaggccctacgggtcgtaaacctcttttgtcggggagcaatgggtgacttgcgagtcatcagggagagtaccc

SEQ ID NO: 7994 - DNA, 490 bp, unidentified
  misc_feature 1..490: note = Ascusbbf_301606, encodes 16S rRNA
  source 1..490: mol_type = genomic DNA
agagtttgatcctggctcaggatgaacgctggcggcgtgcctaacacatgcaagtcgaacggactttaaattgaatgagacttcggttgaaggaaatttaaagttagtggcggacgggtgagtaacgcgtggagaacctgccctgtacagggggataacaaccagaaatggctgctaaaaccgcataagcgcacagtaccgcatggtacagtgtgaaaaactccggtggtacaggatggctccgcgttggattagccagttggcggggtaacggcccaccaaagcgacgatccatagccggcctgagagggtggacggccacattgggactgagacacggcccagactcctacgggaggcagcagtggggaatattgcacaatggggggaaccctgatgcagcgacgccgcgtgaaggaagaagtatctcggtatgtaaacttctatcagcagggaagaaaatgacggtacctgactaagaagccccggc

SEQ ID NO: 7995 - DNA, 490 bp, unidentified
  misc_feature 1..490: note = Ascusbbf_192983, encodes 16S rRNA
  source 1..490: mol_type = genomic DNA
agagtttgatcatggctcaggatgaacgctggcggcgtgcttaacacatgcaagtcgaacgattaacccgccttcgggcggtcatagagtggcgaacgggtgagtaacacgtgaccaacctgccccatgccccgggacaaccgctggaaacggcggctaataccggatactccggcgaggccccatggccccgccgggaaagcccaggcggcatgggatggggtcgcggcccatcaggtagtaggcggggcgacggcccacctagccgacgacgggtagccgggttgagagaccgaccggccacattgggactgagatacggcccagactcctacgggaggcagcagtggggaattttgcgcaatggggggaaccctgacgcagcaacgccgcgtgcgggacgaaggccttcgggttgtaaaccgctttcagcagggaagacatcgacggtacctgcagaagaagccccggctaaatacgtgccagcagc

SEQ ID NO: 7996 - DNA, 490 bp, unidentified
  misc_feature 1..490: note = Ascusbbf_294019, encodes 16S rRNA
  source 1..490: mol_type = genomic DNA
agagtttgatcctggctcaggataaacgctggcggcgcacataagacatgcaagtcgaacggaagtcgttgtaatgaaatggacatgaacagagaacttgttcaaagtgattgaaaatagacttacaacaatggctttagtggcggactggtgagtaacacgtaagcaacctgcctatcagaggggaataacagcgagaaatcgttgctaataccgcatatgccataggtaccacatggtactagtgggaaaggagcaatccgctgatagatgggcttgcgtctgattagttagttggtggggtaacggcctaccaagaccgcgatcagtagccggactgagaggttggacggccacattgggactgagatacggcccagactcctacgggaggcagcagtcgggaatattgcgcaatggaggaaactctgacgcagtgacgccgcgtataggaagaaggttttcggattgtaaactattgtcgataggg

SEQ ID NO: 7997 - DNA, 490 bp, unidentified
  misc_feature 1..490: note = Ascusbbf_184137, encodes 16S rRNA
  source 1..490: mol_type = genomic DNA
agagtttgatcatggctcaggatgaacgctggcggcgtgcctaacacatgcaagtcgagcgggaagtctttgattgaaacttcggtcgaaagatgagatggatagcggcggacgggtgagtaacgcgtaggtaacctgccccttacacagggatagcccggggaaacctggattaatacctgataatgcggtgaagtcacatggctttaccgccaaagatttatcggtgagggatggacctgcgtctgattagccagttggtggggtaacggcctaccaaagcgacgatcagtagccgacctgagagggtaatcggccacattggaactgagacacggtccaaactcctacgggaggcagcagtggggaatattgcacaatgggcgcaagcctgatgcagcaacgccgcgtgagcgatgaaggtcttcggattgtaaagctctgtccttgaggacgaaaattgacggtactcttggaggaagccccggct

SEQ ID NO: 7998 - DNA, 490 bp, unidentified
  misc_feature 1..490: note = Ascusbbf_145261, encodes 16S rRNA
  source 1..490: mol_type = genomic DNA
agagtttgatcatggctcaggacgaacgctggcggcgcgcttaacacatgcaagtcgtacggggcccttcggggttcagtggcgaacgggtgcgtaacacgtgagtgacctgccctggcacgggggataacccggggaaacccgggctaataccgcatgcgctctgcgggcttatggcctgtggaggaaaggtgctgaaaggcactgtgcttggaggggctcgcggcgtatcaggtagttggtgaggtaatggctcaccaagcctacgacgcgtagggggtctgagaggatgaccccccacattgggactgagatacggcccagactcctacgggaggcagcagtggggaatcttgcgcaatggccgaaaggctgacgcagcgacgccgcgtgcgggatgacgcttttcggagtgtaaaccgctgtcgggtgggacgaaggtcccgggaaggaaatgtcctggggatgacggtaccaccagaggaagcac

SEQ ID NO: 7999 - DNA, 490 bp, unidentified
  misc_feature 1..490: note = Ascusbbf_332436, encodes 16S rRNA
  source 1..490: mol_type = genomic DNA
agagtttgatcctggctcagattgaacgctggcggcatgctttacacatgcaagtcggacggcagcgggggagtgcttgcacttctgccggcgagtggcgaacgggtgagtaatacatcggaacgtaccgggtagtgggggataactgatcgaaagatcagctaataccgcatacgctttgagaaggaaagcgggggatcttcggacctcgcgctatccgagcggccgatgtctgattaggtagttggtggggtaaaggcctaccaagccgacgatcagtagcgggtctgagaggatgatccgccacactgggactgagacacggcccagactcctacgggaggcagcagtggggaattttggacaatgggggcaaccctgatccagccatgccgcgtgtctgaagaaggccttcgggttgtaaaggacttttgtcagggaagaaaaggaaggggctaatatcccgttctgatgacggtacctgaagaat

SEQ ID NO: 8000 - DNA, 490 bp, unidentified
  misc_feature 1..490: note = Ascusbbf_1890422, encodes 16S rRNA
  source 1..490: mol_type = genomic DNA
agagtttgatcatggctcaggacgaacgctggcggcgcgcctaacacatgcaagtcgaacggagctgagaggagcttgcttttcttagcttagtggcgaacgggtgagtaacgcgtgagtaacctgccctggagtgggggacaacagttggaaacgactgctaataccgcataagcccacggcccggcatcgggctgcgggaaaaggatttattcgctccaggatggactcgcgtccaattagctagttggtgaggtaacggcccaccaaggcgacgattggtagccggactgagaggttgaacggccacattgggactgagacacggcccagactcctacgggaggcagcagtgggggatattgcacaatgggggaaaccctgatgcagcgacgccgcgtggaggaagaaggttttcggattgtaaactcctgtcgttagggacgataatgacggtacctaacaagaaagcaccggctaactacgtgcc

SEQ ID NO: 8001 - DNA, 490 bp, unidentified
  misc_feature 1..490: note = Ascusbbf_1484321, encodes 16S rRNA
  source 1..490: mol_type = genomic DNA
agagtttgatcatggctcaggacgaacgctggcggcgtgcctaacacatgcaagtcgagcggagaatgcggatatgtttacatagaagtattcttagcggcggacgggtgagtaacacgtgggtaacctgcctcaaagtgggggatagccttccgaaaggaagattaataccgcataagcctacagtatcgcatggtacagtaggaaaaggagcaatccgctttgagatggacccgcggcgcattagctagttggtgaggtaacggctcaccaaggcgacgatgcgtagccgacctgagagggtgatcggccacattggaactgagacacggtccagactcctacgggaggcagcagtggggaatattgcacaatgggcgaaagcctgatgcagcaacgccgcgtgagtgatgaaggccttcgggtcgtaaagctctttgatcagggatgataatgacagtacctgaaaaacaagccacggctaactacg

SEQ ID NO: 8002 - DNA, 490 bp, unidentified
  misc_feature 1..490: note = Ascusbbf_1460857, encodes 16S rRNA
  source 1..490: mol_type = genomic DNA
agagttgatcatggctcaggatgaacgctggcggcgtgcttaacacatgcaagtcgagcgaggcttgtcaacggatgttttcggattgaagatgatgagacctagtggcggacgggtgagtaacgcgtggggaacctgccccattccgggggataccagttggaaacgactgttaataccgcataagcgcacagcaccgcatggtggagtgtgaaaaactgaggtggaacgggatggccccgcgtctgattagccagttggcagggtaacggcctaccaaagcgacgatcagtagccggcctgagagggcgaccggccacattgggactgagacacggcccaaactcctacgggaggcagcagtggggaatattgcacaatgggggaaaccctgatgcagcgacgccgcgtgagtgaagaagtatttcggtatgtaaagctctatcagcagggaagaagatgacggtacctgcacaagaagccccggcta

SEQ ID NO: 8003 - DNA, 490 bp, unidentified
  misc_feature 1..490: note = Ascusbbf_751336, encodes 16S rRNA
  source 1..490: mol_type = genomic DNA
agagtttgatcatggctcaggatgaacgctggcggcgtgcctaatacatgcaagtcgaacgaggtggatgggagcttgctccttgatacctagtggcgaacgggtgagtaacacgtaggtaacctgccttacagtttgggatacccaagggaaactttggctaataccggataattgaccgggaggcatctcctggttctaaaaggggcctttaaagcctcgctgaaagatggacctgcggcgcattagctagttggtgagataacagcccaccaaggcgaggatgcgtagccgacctgagagggtgaacggccacactggaactgagacacggtccagactcctacgggaggcagcagtagggagttttcggcaatgggggaaaccctgaccgagcaacgccgcgtgaacgatgaaggtcttcggattgtaaagttctgttgtaagggaagaatgatatcttgaggaaatgctagatatttgacggtac

SEQ ID NO: 8004 - DNA, 490 bp, unidentified
  misc_feature 1..490: note = Ascusbbf_8035, encodes 16S rRNA
  source 1..490: mol_type = genomic DNA
agagtttgatcatggctcaggataaacgctggcggcgtgcattatgcatgcaagtcgaacgagatacgcaagtatcgagtggcaaacgggtgagtaacacatagataacctgccctcgagtggggaataattctccgaaaggaggactaataccgcatacggtggcttttcacaagaagagttattaaagcagcaatgcgcttgaggaggggtctgtgtccgattagcttgttggtggggtaacggcctaccaaggccatgatcggtagctggtctgagaggatggtcagccacattgggactgagacacggcccagactcctacgggaggcagcagcaaggaattttgcgcaatggacgaaagtctgacgcagcaacgccgcgtgaaggatgaaggtcttcggattgtaaacttcttttataagggacgaatgatgacggtaccttatgaataagcttcggctaactacgtgccagcagccgcggtaat

SEQ ID NO: 8005 - DNA, 490 bp, unidentified
  misc_feature 1..490: note = Ascusbbf_101254, encodes 16S rRNA
  source 1..490: mol_type = genomic DNA
agagtttgatcatggctcaggatgaacgctggcggcaggcctaatacatgcaagtcggacggcagcatgccgtagcaatacggtgatggcgagtggcgtacgggtgcgtaacacgtgtgcaacctgccccgcacagggacaaaacgccgggaaactggcgctaatatcccatgacgccgcgctggggcatcccattgcggctaaagaggcgactcggtgcgggatgggcacgcgtcccattagatagttggcggggtgacggcccaccaagtccgcgatgggtaggggttctgagaggacaggccccccacactggaactgagacacggtccagactcctacgggaggcagcagtaaggaatattggtcaatgggaggaatcctgaaccagccatgccgcgtgcgggaggaaggccctacgggtcgtaaaccgcttttgcccggggatagtgcgcgtcacgagtggcgcgagggaaggtaccgggcgaat

SEQ ID NO: 8006 - DNA, 490 bp, unidentified
  misc_feature 1..490: note = Ascusbbf_141644, encodes 16S rRNA
  source 1..490: mol_type = genomic DNA
agagtttgatcatggctcaggatgaacgctagcggcaggcttaacacatgcaagtcgaggggcagcgggccgtagcaatacggtgccggcgaccggcggacgggtgcgtaacgcgtatgcaaccttccctgcacaggggtatagcccggcgaaagccggaataatcccccatagtttcaactccccgcatgaggggttggataaacgggcgaccgggtgcaggatgggcatgcgtgacattaggcagttggcggggtaacggcccaccaaacctacgatgtctaggggtcctgagagggaggtcccccacactggaactgggacacggtccagactcctacgggaggcagcagtgaggaatattggtcaatggaggaaactctgaaccagccatgccgcgtgcaggaaggaggccctacgggtcgagaactgcttttgttcgggacgagcatgaatacgtgtattcaagtgacggtaccggaagaataag

SEQ ID NO: 8007 - DNA, 490 bp, unidentified
  misc_feature 1..490: note = Ascusbbf_119846, encodes 16S rRNA
  source 1..490: mol_type = genomic DNA
agagtttgatcatggctcaggatgaacgctggcggcacgcttaacacatgcaagtcgaacggagcagaaagagcttgcttttcctgctcagtggcggacgggtgcgtaacgcgtgggtaatctgcccttgacagggggataacgtatagaaatgtacgctaataccgcataagctcacggagtggcatcactctgggggaaaagggataccggtcaaggatgagcccgcgtctgattaggtagttggtgaggtaacggcccaccaagccaacgatcagtagccggtctgagaggatggacggccacattgggactgagacacggcccaaactcctacgggaggcagcagtggggaatattgcacaatggggggaaccctgatgcagcgatgccgcgtgaaggaagaagtatttcggtatgtaaacttctatcagcgaggaagaagatgacagtactcgagtaagaagccccggctaactacgtgccagca

SEQ ID NO: 8008 - DNA, 490 bp, unidentified
  misc_feature 1..490: note = Ascusbbf_458170, encodes 16S rRNA
  source 1..490: mol_type = genomic DNA
agagtttgatcctggctcaggatgaacgctagcgacaggcctaacacatgcaagtcgaggggcagcggggagctgagcttgctcagttctgccggcgaccggcgcacgggtgagtaacgcgtatgcaaccttcccttttcagggggataacccggagaaatccggcctaatatcccatggttccttctgcaggcatctgcggaaggataaaggagtgatccggaaaaggatgggcatgcgtgacattagctagttggcggagtaacggcccaccaaggcgacgatgtctaggggttctgagaggaaggtcccccacactggtactgagacacggaccagactcctacgggaggcagcagtgaggaatattggtcaatgggcgatagcctgaaccagccaagtcgcgtgagggaagacggccctatgggttgtaaacctcttttgtcagggaacaatgaccggcacgcgtgccgggagagagtgtacctga

SEQ ID NO: 8009 - DNA, 490 bp, unidentified
  misc_feature 1..490: note = Ascusbbf_614464, encodes 16S rRNA
  source 1..490: mol_type = genomic DNA
agagtttgatcctggctcagaacgaacgctggtggcatgcctaatacatgcaagtcgcacgagaaagtccttcggggcaagtacagtggcgcacgggtgagtaacgcgtgggtgacgtgccttttagtgggggacaacctcgggaaaccggggctaataccgcatgtgtagtttctatttgaataggaaactataaagatggcctctatttataagctatcgctagaagatcggcccgcgtagcattagcttgttggtggggtaatggcctaccaaggctacgatgcttaactggtctgagaggatgatcagtcacactggaactgagacacggtccagactcctacgggaggcagcagtagggaatattgcacaatgggggaaaccctgatgcagcaatgccacgtgagtgaggaaggccttcgggttgtaaagctctgtcctgagggaagaatggtatggtagctaatatctgctatatttgacggta

SEQ ID NO: 8010 - DNA, 490 bp, unidentified
  misc_feature 1..490: note = Ascusbbf_33958, encodes 16S rRNA
  source 1..490: mol_type = genomic DNA
agagtttgatcatggctcaggacgaacgctggcggcgtgcttcatacatgcaagtcgaacgagaagctagagcttgctctggtggaaagtggcggacgggtgagtaacacgtaggaaacctgccttttagtgggggacaacagagggaaacttctgctaataccccatatgagcgtagctgaaatgctattcttgaaaactccggtgctaaaagatgggcctgcgcctgattagctagttggcggtgtaatggaccaccaaggcgacgatcagtagctggtttgagaggatgatcagccacaatgggactgagacacggcccatactcctacgggaggcagcagtagggaattttgcgcaatgggcgaaagcctgacgcagcaacgccgcgtgaacgtagaagcccttcggggtgtaaagttctgtcagaggggacgaattttgacggtaccctcagaggaagcaccggctaactccgtgccagcagccg

SEQ ID NO: 8011 - DNA, 487 bp, unidentified
  misc_feature 1..487: note = Ascusbbf_1484188, encodes 16S rRNA
  source 1..487: mol_type = genomic DNA
agagtttgatcatgtctcagaacgaacgctggcggcaggcttaacacatgcaagttgaacgggatttgatggtagcttgctatcattaatgagagtagcgcactggtgagtaacacgtgggaatgtacattgtagtgggggacaacaggaggaaacttctgctaataccgcataatccctgagggggaaagatttatcgctataatatcggcccgcggaagattaggcagttggtggggtaaaggcctaccaaacctacgatctatagctggtctgagaggacgatcagccacattggaactgagacacggtccagactcctacgggaggcagcagtgaggaatattgggcaatggagggaactctgacccagccatgccgcgtgagtgagaaggttttcgaattgtaaagctctttcgggcgagaagatgatgacggtatcgccagaagaagtcacggctaactacgtgccagcagccgcggtaat

SEQ ID NO: 8012 - DNA, 490 bp, unidentified
  misc_feature 1..490: note = Ascusbbf_165765, encodes 16S rRNA
  source 1..490: mol_type = genomic DNA
agagtttgatcctggctcaggacgaacgctggcggcgtgcctaacacatgcaagtcgagcgagaagtttttaattgaattcttcggaatgaagttaaaaatggagagcggcggacgggtgagtaacgcgtgagtaacctgccttcaggagggggacaacatttcgaaagggatgctaataccgcataaaattaggatatcgcatgataaactaatcaaagatttatcgcctgaagatggactcgcgtccgattagttagttggtggggtaacggcctaccaagacgacgatcggtagccgaactgagaggttgatcggccacattgggactgagacacggcccagactcctacgggaggcagcagtgggggatattgcgcaatggggggaaccctgacgcagcaacgccgcgtgaaggaagaaggccttcgggttgtaaacttctttaagtgtggaagataatgacggtacacacagaataagccacggc

SEQ ID NO: 8013 - DNA, 490 bp, unidentified
  misc_feature 1..490: note = Ascusbbf_1414828, encodes 16S rRNA
  source 1..490: mol_type = genomic DNA
agagtttgatcatggctcagaacgaacgctggcggcgcgtcttaagcatgcaagtcgagcgggattgtccagcttgctggacatgagagcggcggactggcgaggagcgcgtgggcgacgcgccccccggactggaacagcccgtggaaacacggggtaatgccggacggcatgcccatcttggagggtgggcatcaaaggggcttcggccccgccgggggagcggcccgcgtcccatcagcttgttggcggcgcaagggaccaccaaggctacgacgggtgtccggcctgagagggcgatcggacgcattgggactgagatacggcccagactcctacgggaggcagcagctaagaatattccgcaatgggcgaaagcctgacggagcgacgccgcgtggacgatggaggccggaaggttgtaaagtccttttgggagggaagaagaaggccgggaggaaacgcccggccggcgacggtacctcgcgaa

SEQ ID NO: 8014 - DNA, 490 bp, unidentified
  misc_feature 1..490: note = Ascusbbf_117439, encodes 16S rRNA
  source 1..490: mol_type = genomic DNA
agagtttgatcctggctcaggatgaacgctggcggcgtgcctaacacatgcaagtcgagcgggaatcgcccgaatgagatttcggtcaaatgaaggcgaggatagcggcggacgggtgagtaacgcgtaggtaagctgccctttgctgttggatagcctcgggaaactgggattaatacaacataacgcgtcgaggtcacatggtcttgacgccaaagatttatcggcaaaggatgcacctgcgtctgattagatagttggtgaggtaacggcccaccaagtcaacgatcagtagccgacctgagagggtgatcggccacattggaactgagacacggtccaaactcctacgggaggcagcagtggggaatattgcacaatgggggaaaccctgatgcagcaacgccgcgtgagcgaagaaggtcttcggatcgtaaagctctgtccttggggacgaaggaagtgacggtacccgaggaggaagccccgg

SEQ ID NO: 8015 - DNA, 490 bp, unidentified
  misc_feature 1..490: note = Ascusbbf_710843, encodes 16S rRNA
  source 1..490: mol_type = genomic DNA
agagtttgatcctggctcaggacgaacgctggcggcatgcttaacacatgcaagtcgaacggagttatttccttcgggagataacttagtggcgaacgggtgagtaacacgtgaataacctgccttgtacacacgaataacaagccgaaaggtttgataatgcgcgataatatcgtagcctcgcatgaggcaacgaccaaagctccggcggtgcaagatggattcgcggcccattagctagttggtgaggtaacggcccaccaaggcaacgatgggtagccgacctgagagggtgatcggccacactggaactgagacacggtccagactcctacgggaggcagcagtggggaatattgggcaatgggcgcaagccttacccagcaatgccgcgtgagtgaagaaggtctttggattgtaaagctctttgattggggacgaaacaaatgacggtacccaaagaacaagccccggctaactacgtgccagc

SEQ ID NO: 8016 - DNA, 490 bp, unidentified
  misc_feature 1..490: note = Ascusbbf_1717473, encodes 16S rRNA
  source 1..490: mol_type = genomic DNA
agagtttgatcatggctcagaacgaacgctggcggcgcgtcttaagcatgcaagtcgagcgggattagggtagcttgctaccctatgagagcggcggactggtgagtaacgcgtagatgacgaaccctccggacggggacagccggtagaaataccgggtaataccggatacggtcgtatgtgtcagaggcatacgaggaaaggagctcaggctccgccgggggatcggtctgcgacccatcagctagatggcggggtaaaggcccaccatggcgatgacgggtatccggcctaagagggtgaacggacacattgggactgagatacggcccagactcctacgggaggcagcagctaagaatattccgcaatgggcgaaagcctgacggagcgacgccgcgtggacgatgaaggccggaaggttgtaaagtcctttagtctgtgaggaataagccagagagggaatgctctggcggtgactgtagcagaa

SEQ ID NO: 8017 - DNA, 490 bp, unidentified
  misc_feature 1..490: note = Ascusbbf_137086, encodes 16S rRNA
  source 1..490: mol_type = genomic DNA
agagtttgatcctggctcaggacgaacgctggcggtatgcctaacacatgcaagtcgaacgagtacttgagagcttgctcttttgtgctagtggcggacgggtgagtaacgcgtgagtaatctgccttaaagtgggggataacatttggaaacaaatgctaataccgcgtaagatattttcttcgcatgaagtttgtatcatagttttttcgctttaagatgagctcgcgtccgattagtttgttggcgaggtaaatgctcaccaagactgcgatcggtagccgggttgagagactgaacggccacattggaactgagacacggtccagactcctacgggaggcagcagtggggaatattgcacaatgggggaaaccttgatgcagcaataccgcgtgagggatgaaggctctagggttgtaaacctctgtccaaagggacgaattttgacggtacctttgaaggaagctccggctaactacgtgccagc

SEQ ID NO: 8018 - DNA, 490 bp, unidentified
  misc_feature 1..490: note = Ascusbbf_273743, encodes 16S rRNA
  source 1..490: mol_type = genomic DNA
agagtttgatcatggctcagattgaacgctggcggcaggcctaacacatgcaagtcgagcgcgaaaggtcttcggaccgagtagagcggcggacgggtgagtaatgcgcaggaatttgcccagtagtgggggataacgtccggaaacgggcgctaataccgcatacgtcctacgggagaaagcaggggaccttcgggccttgcgctattggagaagcctgcgtcggattagcttgttggtggggtaaaggcctaccaaggcgacgatccgtagctggtctgagaggatgatcagccacactgggactgagacacggcccagactcctacgggaggcagcagtggggaatattggacaatgggggcaaccctgatccagccatgccgcgtgtgtgaagaaggccttagggttgtaaagcactttcagtggggaggaaggcccgttggctaatacccatcgggattgacgttacccacagaagaagcaccgg

SEQ ID NO: 8019 - DNA, 490 bp, unidentified
  misc_feature 1..490: note = Ascusbbf_1529662, encodes 16S rRNA
  source 1..490: mol_type = genomic DNA
agagtttgatcctggctcaggacgaacgctggcggcgtgcttaacacatgcaagtcgaacgaggttattttgaaagcttgcttttaggataaccgagtggcgaacgggtgagtaacgcgtgagcaacctgtctcacacagggggataacgcatcgaaagatgtgctaataccgcatgagaccacagggggacatccccccggggtcaaaggagcaatccggtgtgaggtgggctcgcgtctgattagatagttggtgaggtaacggcccaccaagtcaacgatcagtagccgacctgagagggtgatcggccacattgggactgagacacggcccagactcctacgggaggcagcagtggggaatattgggcaatgggcgcaagcctgacccagcaacgccgcgtgagggaagaaggttttcggattgtaaacctctgtcctacatgaagaggagtagacggtagtgtaggaggaagccccggctaacta

SEQ ID NO: 8020 - DNA, 490 bp, unidentified
  misc_feature 1..490: note = Ascusbbf_1365645, encodes 16S rRNA
  source 1..490: mol_type = genomic DNA
agagtttgatcatggctcaggagaaacgctggcggcgcacataagacatgcaagtcgaacggaatttagtcgaatgtttacatgagacgaaaatttagtggcggacgggtgagtaacacgtgagcaacctgcctttaggagggggataacattgagaaatcagtgctaataccgcataacgcataactgtcgcatggcagatatgccaaaggagcaatccacctaaagatgggctcgcggctgattagttagttggtggggtaacggcctaccaagacgatgatcagtagccgagctgagaggcacaacggccacattgggactgagacacggcccagactcctacgggaggcagcagtcgggaatattgcacaatggaggaaactctgatgcagtgacgccgcgtacaggaagaaggtctttggattgtaaactgttgtcgacagggaagaaaaatgacagtacctgtggaggaagctccggcaaacta

SEQ ID NO: 8021 - DNA, 490 bp, unidentified
  misc_feature 1..490: note = Ascusbbf_1517713, encodes 16S rRNA
  source 1..490: mol_type = genomic DNA
agagtttgatcctggctcagagtgaacgctggcggcatggcttagacatgcaagtcgaacgatagtactccttcgggggtacaaaagtggcaaacgggtgcgtaacacgtgaacaatctaccttaaagtgggggatagcccagggaaacttggattaataccgcatgtggcagagtctcgcatgggattctcgctaaagcttgtaatggtgctttaagaggagttcgcggcctatcagcttgttggtgaggtaacggctcaccaaggctaagacgggtagctggtctgagaggatgatcagccacactgggactgagacacggcccagacacctacgggtggcagcagtctcgaatcattcacaatgggcaaaagcctgatggtgcaatgccgcgtgggggatgaaggtcttcggattgtaaacccctgtcattaaggactaaaacactgtgaagagcagtcttgaattaacttaaagaggaagaggtgg

SEQ ID NO: 8022 - DNA, 490 bp, unidentified
  misc_feature 1..490: note = Ascusbbf_1749968, encodes 16S rRNA
  source 1..490: mol_type = genomic DNA
agagtttgatcatggctcaggacgaacgctggcggcgcgcctaacacatgcaagtcgaacggagctattttggcagaacccttcggggggaagctggtttagcttagtggcggacgggtgagtaacacgtgagcaacctgcctttcagagggggataacgtttggaaacgaacgctaataccgcataacgcagcgggccggcatcggcctgctgccaaaggagcaatccgctgaaagatgggctcgcgtccgattagatagttggtgaggtaacggcccaccaagtcgacgatcggtagccggactgagaggttgaacggccacattgggactgagacacggcccagactcctacgggaggcagcagtgggggatattgcacaatgggcgaaagcctgatgcagcgacgccgcgtgagggaagacggccttcgggttgtaaacctctgtctttggggacgataatgacggtacccaaggagaaagctccg

SEQ ID NO: 8023 - DNA, 490 bp, unidentified
  misc_feature 1..490: note = Ascusbbf_738768, encodes 16S rRNA
  source 1..490: mol_type = genomic DNA
agagtttgatcctggctcaggatgaacgctagctacaggcttaacacatgcaagtcgaggggcagcatagaagttagcttgctaacttcggatggcgaccggcggatgggtgagtaacacgtatccaacctagcctttacaacgggataggctttcgaaagaaagattaatactgtatgttccgtgatcgcctcatggcgattccggcaaagatttatcggtaaaggatggggatgcgttccattaggtagtaggtgaggtaacggcccacctagcctacgatggataggggttctgagaggaaggtcccccacattggaactgagacacggtccaaactcctacgggaggcagcagtgaggaatattggtcaatgggcgagagcctgaaccagccaagtagcgtgcaggaagacggccctatgggttgtaaactgcttttgaaggggaataaaggggtctacgtgtagatctttgcatgtacctttcga

SEQ ID NO: 8024 - DNA, 490 bp, unidentified
  misc_feature 1..490: note = Ascusbbf_1313722, encodes 16S rRNA
  source 1..490: mol_type = genomic DNA
agagtttgatcctggctcaggacgaacgctggcggcgtgcctaacacatgcaagtcgagcgaggtccaacctgtggcaacacaggggaagacctagcggcgaacgggtgagtaacacgtgagaaacctgccccgaacactgggataaccaggggaaaccctggctaataccggatgccctccagaggccgcatggccattggaggaaagatttatcggtttgggagggtctcgcggcctatcagctagttggtggggtaacggcccaccaaggcgtcgacgggtagctggtctgagaggacgatcagccacactgggactgagacacggcccagactcctacgggaggcagcagtggggaatattgcgcaatgggcgaaagcctgacgcagcaacgccgcgtgcgggatgaaggccttcgggttgtaaaccgctttcggcagggacgaaattgacggtacctgcagaagaagccccggccaactacgtgc

SEQ ID NO: 8025 - DNA, 490 bp, unidentified
  misc_feature 1..490: note = Ascusbbf_667875, encodes 16S rRNA
  source 1..490: mol_type = genomic DNA
agagtttgatcctggctcaggatgaacgctagcgataggcttaacacatgcaagtcgaggggcagcacttcgggtggcgaccggcgcacgggtgagtaacgcgtatgcaacctaccttctacagggggataacctctcgaaagagagactaataccgcataaaacaggggcaccgcatggtgatatttgttaaagatttattggtagaagatgggcatgcgtaacattagcttgttggtgaggtaacggctcaccaaggcaacgatgtttaggggttctgagaggaaggtcccccacactggtactgagacacggaccagactcctacgggaggcagcagtgaggaatattggtcaatggacgcaagtctgaaccagccaagtcgcgtgaaggacgaaggtattatgtattgtaaacttctttttcaggggaataaagtgaggcttgcgagcctttttgcaagtaccctgcgaataaggatcggctaact

SEQ ID NO: 8026 - DNA, 490 bp, unidentified
  misc_feature 1..490: note = Ascusbbf_312026, encodes 16S rRNA
  source 1..490: mol_type = genomic DNA
agagtttgatcctggctcaggataaacgctggcggcgcacataagacatgcaagtcgaacggaagtcgttatactgatttggatatgaacggagaacttgttcaaaggaaattgacattgatttataacaatggctttagtggcggactggtgagtaacgcgtgagcaacctgcctatcagaggggaacaacagttagaaatgactgctaataccgcatatgcctaagtaacacatgttacaatagggaaaggagcaatccgctgatagatgggctcgcgtctgattagatagttggtggggtaacggcctaccaagtcaacgatcagtagccggactgagaggttgaacggccacattgggactgagatacggcccagactcctacgggaggcagcagtcgggaatattgcgcaatggaggaaactctgacgcagtgacgccgcgtgcaggaagaaggttttcggattgtaaactgctttagacaggga

SEQ ID NO: 8027 - DNA, 490 bp, unidentified
  misc_feature 1..490: note = Ascusbbf_8484, encodes 16S rRNA
  source 1..490: mol_type = genomic DNA
agagtttgatcctggctcaggatgaacgctggcggcgtgcttaacacatgcaagtcgaacggagatgaatttaggaagttttcggatggaatatgttcatcttagtggcggacgggtgagtaacgcgtaaacaatctgccttggagagggggataacagatagaaatatctgctaataccgcataagaccacaactgggcatccagatggggtaaaaggagttaaatccgcttcaagatgagtttgcgtactattagttagttggtgaggtaacggcccaccaagacaacgatggttagccggcctgagagggtgaacggccacattggaactgagaaacggtccagactcctacgggaggcagcagtgaggaatattgggcaatgggcgaaagcctgacccagcaacgccgcgtgaaggaagaaggtcttcggattgtaaacttctgttatgggggaaaaaggaagtgatggtaccccatgagaaagct

SEQ ID NO: 8028 - DNA, 490 bp, unidentified
  misc_feature 1..490: note = Ascusbbf_7273, encodes 16S rRNA
  source 1..490: mol_type = genomic DNA
agagtttgatcatggctcaggatgaacgctggcggcaggcttaatacatgcaagttgaacggtaacatgagagtagcaatacttttgatgacgagtggcgtacgggtgcgtaacacgtgtgtaacctacctcatacaggaacaaaacacttggaaacgggtgctaatattccatagtattattttaaggcatcttagaataattaaagtcgcgagatggtatgagatgggcacgcggtccattagctagttggtatggtaacggcataccaaggcgacgatggataggggttctgagaggaaagacccccacattggaactgagacacggtccaaactcctacgggaggcagcagtaaggaatattggtcaatggtcggaagactgaaccagccatgccgcgtgcaggaatacggccctatgggttgtaaactgcttttattagaggataaagtggtgtacgagtacattattgcaggtatctaatgaat

SEQ ID NO: 8029 - DNA, 490 bp, unidentified
  misc_feature 1..490: note = Ascusbbf_61578, encodes 16S rRNA
  source 1..490: mol_type = genomic DNA
agagtttgatcctggctcaggatgaacgctggcggcgtgcctaacacatgcaagtcgaacgaagcactttggttgatccttcgggtgatacttttgtgactgagtggcggacgggtgagtaacgcgtgggtaacctgccctgtacagggggataacagccagaaatggctgctaataccgcataagcgcacggaaggacatccttcagtgtgaaaaactccggtggtacaggatgggcccgcgtctgattagcttgttggcggggtaaaggcccaccaaggcgacgatcagtagccggtctgagaggatgaacggccacattggaactgagacacggtccaaactcctacgggaggcagcagtggggaatattgcacaatgggggaaaccctgatgcagcaacgccgcgtgagtgaagaagtatttcggtatgtaaagctctatcagcagggaagataatgacggtacctgactaagaagctccggctaa

SEQ ID NO: 8030 - DNA, 490 bp, unidentified
  misc_feature 1..490: note = Ascusbbf_68183, encodes 16S rRNA
  source 1..490: mol_type = genomic DNA
agagtttgatcatggctcaggatgaacgctagcggcaggcttaacacatgcaagtcgaggggcagcgcgggtagcaatacctggcggcgaccggcgaaagggtgcgtaacgcgtgagcaacattcccgtatttgggggataagcagtggaaacgctgtctaataccccataacaacagaatccgcatggactcagtttaaaagattcgtcgaatacggattggctcgcgtggcattagctagtcggcggggtaacggcccaccgaggcgacgatgcctaggggttctgagaggaagaccccccacattgggactgagacacggcccaaactcctacgggaggcagcagtgaggaatattggtcaatggacggaagtctgaaccagccatgccgcgtgaaggatgactgccctatgggttgtaaacttcttttgcagcagagcaataaggtgtacgtgtacaccgatgagagtatgttgcgaataagcatc

SEQ ID NO: 8031 - DNA, 490 bp, unidentified
  misc_feature 1..490: note = Ascusbbf_81717, encodes 16S rRNA
  source 1..490: mol_type = genomic DNA
agagtttgatcctggctcaggacgaacgctggcggcgtgcttaacacatgcaagtcgaacgagacttaaggaagagcttgctcggagataagtcgagtggcggacgggtgagtaacgcgtgaataatctgtctcatacagggggataacgcatcgaaagatgtgctaataccgcgtaggaccacgggttcgcatggaaccgaggtgaaaggagcaatccggtatgaggtgagttcgcgtctgattagatagttggtgaggtaaaggcccaccaagtcaacgatcagtagccgacctgagagggtgatcggccacattgggactgagacacggcccagactcctacgggaggcagcagtggggaatattgggcaatgggcggaagcctgacccagcaacgccgcgtgaaggaagaaggttttcggatcgtaaacttctgtcctatatgaagataatgacggtagtataggaggaagccccggctaactacg

SEQ ID NO: 8032 - DNA, 490 bp, unidentified
  misc_feature 1..490: note = Ascusbbf_136915, encodes 16S rRNA
  source 1..490: mol_type = genomic DNA
agagtttgatcctggctcaggataaacgctggcaccatgcctaatacatgcatgtcgtacgagagcttcggctctagtggcaaatgggtgagtaacacgtaaggaactttccctagcgacgaggataacggttggaaacgactgctaatactggatagtatatagaaccgcatgattttatatttaaaggtccgtttggaccacgctaggatagccttgcggcgcattagatagttggtgaggtaacggcccaccaagtctatgatgcgtagctgcactgagaggtgaaacagccacattgggactgagacacggcccaaactcctacgggaggcagcagtagggaattttcggcaatgagcgaaagcttgaccgagcaatggtgcgtgaatgatgaaggtctttggattgtaaaattcttttattggggaagaaaaaatcgattaggaaatgattcgatcttgacggtacccattgaataagccccggc

SEQ ID NO: 8033 - DNA, 490 bp, unidentified
  misc_feature 1..490: note = Ascusbbf_66967, encodes 16S rRNA
  source 1..490: mol_type = genomic DNA
agagtttgatcatggctcagattgaacgctagcgggatgctttacacatgcaagtcgaacggcagcacgaggagcttgctccttggtggcgagtggcgaacgggtgagtaatgtatcggaacgtgcccagtagcgggggataactactcgaaagagtggctaataccgcatacgtcctacgggagaaagcgggggaccttcgggcctcgcactattggagcggccgatatcggattagctagttggtggggtaaaggcctaccaaggcgacgatccgtagctggtttgagaggacgaccagccacactgggactgagacacggcccagactcctacgggaggcagcagtggggaattttggacaatgggggcaaccctgatccagccatcccgcgtgtgcgatgaaggccttcgggttgtaaagcacttttgtcagggaagaaatcgcgtggacgaataatctgcgtggatgacggtacctgaagaataa

SEQ ID NO: 8034 - DNA, 490 bp, unidentified
  misc_feature 1..490: note = Ascusbbf_68059, encodes 16S rRNA
  source 1..490: mol_type = genomic DNA
agagtttgatcatggctcaggatgaacgctggcggcgtgcctaacacatgcaggtcgaacgggacctatgtagatcaagacttcggtcaagtgaaatttaggtttagtggcggacgggtgagtaacgcgtgagcaatctgccgtatgcagggggacaacagagggaaacttctgctaataccgcataagcgcacagtatcgcatggtacagtgtgaaaagctccggcggcatacgatgagctcgcgtctgattagccagttggcggggtaacggcccaccaaagcgacgatcagtagccggcctgagagggtgaacggccacattgggactgagagacggcccagactcctacgggaggcagcagtgggggatattgcacaatggagggaactctgatgcagcgacgccgcgtgggtgaagaagtatttcggtatgtaaagccctatcagcagggaagataatgacggtacctgactaagaagccccggc

SEQ ID NO: 8035 - DNA, 490 bp, unidentified
  misc_feature 1..490: note = Ascusbbf_1427548, encodes 16S rRNA
  source 1..490: mol_type = genomic DNA
agagtttgatatggctcaggacgaacgctggcggcgtgcttaacacatgcaagtcgagcggaaaggccccttcgggggtactcgagcggcgaacgggtgagtaacacgtgagcaacctgcccctgactctgggataagcccgggaaactgggtctaataccggatacgaccggccttcgcatggagtgtcggtggaaagtttttcggttggggatgggctcgcggcctatcagcttgttggtggggtgatggcctaccaaggcgacgacgggtaaccggcctgagagggcgaccggtcacactgggactgagacacggcccagactcctacgggaggcagcagtggggaatattgcgcaatgggcggaagcctgacgcagcgacgccgcgtgggggatgacggccttcgggttgtaaacctctttcagcagggacgaagctaacgtgacggtacctgcagaagaagcgccggctaactacgtgccagcag

SEQ ID NO: 8036 - DNA, 490 bp, unidentified
  misc_feature 1..490: note = Ascusbbf_95000, encodes 16S rRNA
  source 1..490: mol_type = genomic DNA
agagtttgatcatggctcaggatgaacgctggcggcgtgcctaacacatgcaagtcgagcgagaattaaggaaacgatacttcggtaaagcggaattaaggacagcggcggacgggtgagtaacgcgtgggcaacctgccccttactggtggatagccgcgggaaactgcgagtaatacaccataatgcatagagaagacatcttcattatgccaaagatttatcggtaagggatgggcccgcgtccgattagctggttggtgaggcagcggctcaccaaggcgacgatcggtagccggcctgagagggcgatcggccacattggaactgagacacggtccagactcctacgggaggcagcagtggggaatattgcacaatgggggaaaccctgatgcagcaacgccgcgtgaaggaagaaggccttcgggtcgtaaacttctgttgaggggaaagatcatgacggtacccctttagaaagccccggcta

SEQ ID NO: 8037 - DNA, 490 bp, unidentified
  misc_feature 1..490: note = Ascusbbf_716067, encodes 16S rRNA
  source 1..490: mol_type = genomic DNA
agagtttgatcctggctcaggatgaacgctggcggcgtgcctaacacatgcaagtcgaacggttaacccacctccgggtggtcatacagtggcgaacgggtgagtaacacgtgaccaacctgccccgcgctccgggacagcctcgcgaaagcgggattaataccggatgcgccccctcccccgcatgggggaggggggaaagcccaggcggcgcgggatggggtcgcggcccatcaggtagacggtcgggtggaggccgaccgtgccgacgacgggtagccgggttgagagaccgaccggccacattgggactgagatacggcccagactcctacgggaggcagcagtggggaatattgcgcaatgggggcaaccctgacgcagcaacgccgcgtgcgggacgacggccttcgggttgtaaaccgctttcagcagggaagacatcgacggtacctgcagaagaagccccggctaactacgtgccagcagc

SEQ ID NO: 8038 - DNA, 490 bp, unidentified
  misc_feature 1..490: note = Ascusbbf_134853, encodes 16S rRNA
  source 1..490: mol_type = genomic DNA
agagtttgatcctggctcaggacaaacgctggcggcgtgcctaacacatgcaagtcgaacgaagcaccggggaaagagacttcggtcaatggatccggtgacttagtggcggacgggtgagtaatgcatgagcaacctgccctggagagggggacaacagctggaaacggctgctaataccgcatgatgtcgttggagggcatcctttgacgaccaaagatttatcgctctgggatgggctcatgtctgattagttagttggcggggcaacggcccaccaagactacgatcagtagccggactgagaggttgaacggccacattgggactgagatacggcccagactcctacgggaggcagcagtggggaatattgggcaatgggcgcaagcctgacccagcaacgccgcgtgaaggaagaaggctttcgggttgtaaacttcttttatcagggacgaaggatgtgacggtacctgatgaataagccacg

SEQ ID NO: 8039 - DNA, 490 bp, unidentified
  misc_feature 1..490: note = Ascusbbf_1227918, encodes 16S rRNA
  source 1..490: mol_type = genomic DNA
agagtttgatcctggctcaggacgaacgctggcggcgtgcctaatacatgcaagtcgagcggacgttttattggtgcttgcaccgataaaacgttagcggcggacgggtgagtaacacgtgggcaacctgccctgtagattgggataactccgggaaaccggggctaataccgaataatactttttaactcatgttagaaagttaaaagatggttctgctatcactacaggatgggcccgcggcgcattagctagttggtgaggtaacggctcaccaaggcgacgatgcgtagccgacctgagagggtgatcggccacactgggactgagacacggcccagactcctacgggaggcagcagtagggaatcttccacaatgggcgaaagcctgatggagcaacgccgcgtgagtgaagaaggatttcggttcgtaaaactctgttgtaagggaagaacaagtagcgtagtaactggcgctaccttgacggt

SEQ ID NO: 8040 - DNA, 490 bp, unidentified
  misc_feature 1..490: note = Ascusbbf_4983, encodes 16S rRNA
  source 1..490: mol_type = genomic DNA
agagtttgatcatggctcaggatgaacgctggcggcaggcttaatacatgcaagtcgaacggtaaggcccgaagtggcaacaccaagggtacacgagtggcgcacgggtgcgtaacgcgtatgcaacctgcccccaaccgggacaaaacagctggaaacggctgctaatatcccatggtcatccgggagggcatccttctggatgtaaagattcattggttggggatgggcatgcgtattattaggtagttggcggggtaacggcccaccaagccgacgatgattaggggtcctgagagggttatcccccacactggaactgagacacggtccagactcctacgggaggcagcagtagggaatattgggcaatgggagcaatcctgacccagccatgccgcgtgaaggaagacggtcctatggattgtaaacttcttttgccgcagagtaaccgcggggacgcgtccccgcctgagagtatgcggcgaat

SEQ ID NO: 8041 - DNA, 490 bp, unidentified
  misc_feature 1..490: note = Ascusbbf_47434, encodes 16S rRNA
  source 1..490: mol_type = genomic DNA
agagtttgatcatggctcaggatgaacgctagcgacaggcctaacacatgcaagtcgaggggcagcgcggatgtagcaatacgtttggcggcgaccggcgcacgggtgcgtaacaggtgtgcaatctgtccataatcggggaataacccggcgaaagccgaactaacgctccatgtgagcgagcggggcatcctgcttgtttgaaacgtgaggattatgggtgagcacgcttctgattagatagttggtggggtaacggctcaccaagtcgacgatcagtaggggttctgagaggaaggtcccccacattggaactgagacacggtccaaactcctacgggaggcagcagtgaggaatattggtcaatgggcgagagcctgaaccagccaagtcgcgtgaaggatgaaggttctatggattgtaaacttcttttattcgagggtaaagtgtggtacgtgtaccatattgcaagtatcgaatgaataagca

SEQ ID NO: 8042 - DNA, 490 bp, unidentified
  misc_feature 1..490: note = Ascusbbf_70731, encodes 16S rRNA
  source 1..490: mol_type = genomic DNA
agagtttgatcatggctcaggatgaacgctggcggcgtgcctaacacatgcaagtcgaacgaagcactggaaccgatttcttcggactgacgttcctttgacttagtggcggacgggtgagtaacgcgtggataacctgcctgtatctgggggataacagttagaaatgactgctaataccgcataagcgcacagtaccgcatggtaaagtgtgaaaagccttgtgcggatacagatggatccgcgttagattagccagttggcggggtaacggcccaccaaagcgacgatctatagccggcctgagagggcgaccggccacattgggactgagacacggcccaaactcctacgggaggcagcagtggggaatattgcacaatgggggaaaccctgatgcagcgacgccgcgtgagcgatgaagtatttcggtatgtaaagctctatcagcagggaagaaattgacggtacctgactaagaagccccggc

SEQ ID NO: 8043 - DNA, 490 bp, unidentified
  misc_feature 1..490: note = Ascusbbf_240623, encodes 16S rRNA
  source 1..490: mol_type = genomic DNA
agagtttgatcatggctcaggattaacgctggcggcatgcctaatacatgcaagtcgaatgggaagcttgctttccatggcgaacgggtgagtaacacgtaggtaacctgtctttaagacgaggataacctttggaaacgaaggataatactggatagtacatcacaaatcacatgattagatgtttaaaggagcaatccacttagagaggggcctgcggcgcattagctagttggtgaggtaagagcccaccaaggcgatgatgcgtagccggactgagaggttgaacggccacaatgggactgagaacggcccatactcctacgggaggcagcagtagggaattttcggcaatggacgaaagtctgaccgagcaatgccgcgtgaatgatgaagtatttcggtatgtaaaattcttttatatgggacgaaaaaacaaattgacggtaccatatgaataagctccggctaactacgtgccagcagccgc

SEQ ID NO: 8044 - DNA, 490 bp, unidentified
  misc_feature 1..490: note = Ascusbbf_666407, encodes 16S rRNA
  source 1..490: mol_type = genomic DNA
agagttcgatcctggctcaggacgaacgctggcggcgtgcctaacacatgcaagtcgaacgaagcactgcggaaagagacttcggtcaatggaagctttgacttagtggcggacgggtgagtaacgcgtgaggaacctgcctttcagtgggggacaacagttggaaacgactgctaataccgcataatgtgttttgggggcatccccggaacaccaaagatttattgctgaaagatggactcgcgtctgattagatagttggtggggtaacggcctaccaagtcgacgatcagtagccggactgagaggttgaacggccacattgggactgagatacggcccagactcctacgggaggcagcagtggggaatattgggcaatgggggaaaccctgacccagcaacgccgcgtgaaggaagaaggctttcgggttgtaaacttcttttaccagggacgaaggacgtgacggtacctggagaaaaagccacg

SEQ ID NO: 8045 - DNA, 490 bp, unidentified
  misc_feature 1..490: note = Ascusbbf_156249, encodes 16S rRNA
  source 1..490: mol_type = genomic DNA
agagtttgatcatggctcaggacgaacgctggcggtatgcttaacacatgcaagtcgaacgagacgttgggcgaattggtttcggctgatgagtctgacagaaagtggcgaacgggtgagtaacgcgtgggcaacctaccttatggaaagggatagcctcgggaaactgggagtaaaaccttataacatatgtttattgcatggtagacatatcaaaactccggtgccatgagatgggcccgcgtcctattagctagttggtgagataacagctcaccaaggcgacgataggtaaccggtctgagagggcgaacggtcacactggaactgagacacggtccagactcctacgggaggcagcagtggggaatattgcgcaatggggggaaccctgacgcagcaataccgcgtgagtgaagaaggatttcggtctgtaaagctcttttattagggaagaagaagtgacggtacctaatgaataagtcccggc

SEQ ID NO: 8046 - DNA, 490 bp, unidentified
  misc_feature 1..490: note = Ascusbbf_89375, encodes 16S rRNA
  source 1..490: mol_type = genomic DNA
agagtttgatcatggctcaggatgaacgctggcggcgtgcctaacacatgcaagtcgagcggagatacttttataagcttgcttaaggagtatcttagcggcggatgggtgaggaacgcgtggagaacctgcccttcacagggggataacagttggaaacgactgttaataccgcatatgctcacagcaccgcatggtgcagggaggaaagcgctagtggtgaaggatggctccgcgtcggattagccagttggcggggtaacggcccaccaaagcgatgatccgtagccggcctgagagggcgaccggccacattgggactgagacacggcccaaactcctacgggaggcagcagtgggggatattgcacaatgggcgaaagcctgatgcagcgacgccgcgtgaaggaagacgtacctcggtatgtaaacttctatcagcagggaagaagatgacggtacctgactaagaagccccggctaactacgt

SEQ ID NO: 8047 - DNA, 470 bp, unidentified
  misc_feature 1..470: note = Ascusbbf_160104, encodes 16S rRNA
  source 1..470: mol_type = genomic DNA
agagtttgatcctggctcagaacgaacgctggcggcaggcttaacacatgcaagtcgaacgccctcttcggagggagtggcagacgggtgagtaacacgtgggaacctacctaggggtacggaataactcggggaaactcgtgctaataccgtatacgaccttcgggtgaaagatttatcgcccctagatgggcccgcgctggattagctagttggtggggtaaaagctcaccaaggcgacgatccatagctggtctgagaggatgatcagccacactgggactgagacacggcccagactcctacgggaggcagcagtggggaatcttggacaatgggcgcaagcctgatccagccatgccgcgtgagtgatgaaggccttagggttgtaaagctctttcgccagggaagataatgactgtacctggataagaagccccggctaactccgtgccagcagccgcggtaat

SEQ ID NO: 8048 - DNA, 490 bp, unidentified
  misc_feature 1..490: note = Ascusbbf_1440099, encodes 16S rRNA
  source 1..490: mol_type = genomic DNA
agagtttgatcctggctcaggatgaacgctggcggcgtgcctaatacatgcaagtcgtacgcgattagagcgcttgctctttgatcgagtggcgaacgggtgagtaacacgtgggtaacctgccctatagttgggaatacctaagggaaactttagttaataccgaataatgttagtgagaggcatctcttactaaagaaagcagcttttgctgcgctattggatggacctgcggcgcattagttagttggtgaggtaacggctcaccaagaccaggatgcgtagccgacctgagagggtgatcggccacaatgggactgagacacggcccatactcctacgggaggcagcagtagggagttttcggcaatgggggaaaccctgaccgagcaacgccgcgtgaacgatgaaggtcttcggattgtaaagttctgttgtaagggagtaatggcttcgagaatagaatgctcgaggtttgaaagtaccttac

SEQ ID NO: 8049 - DNA, 482 bp, unidentified
  misc_feature 1..482: note = Ascusbbf_665356, encodes 16S rRNA
  source 1..482: mol_type = genomic DNA
agagtttgatcctggctcagaacgaacgctggcggcaggcttaacacatgcaagtcgagcgccccgcaaggggagcggcagacgggtgagtaacgcgtgggaatctacccatctctacggaataactcagggaaacttgtgctaataccgtatacgcccctttttggagacattgagggggaaagatttatcggagatggatgagcccgcgttggattagctagttggtggggtaaaggcctaccaaggcgacgatccatagctggtctgagaggatgatcagccacactgggactgagacacggcccagactcctacgggaggcagcagtggggaatattggacaatgggcgcaagcctgatccagccatgccgcgtgagtgatgaaggccctagggttgtaaagctctttcaccgatgaagataatgacggtagtcggagaagaagccccggctaacttcgtgccagcagccgcggtaat

SEQ ID NO: 8050 - DNA, 490 bp, unidentified
  misc_feature 1..490: note = Ascusbbf_1486655, encodes 16S rRNA
  source 1..490: mol_type = genomic DNA
agagtttgatcatggctcaggatgaacgctagcgacaggcctaacacatgcaagtcgaggggtagcggaatgtagcaatacatttgctgacgaccggcgcacgggtgagtaacgcgtatgcaacctgcctactacagggggataacccggagaaattcggactaataccgcataatacagggataccgcatggtaatatttgttaaagattaattggtagtagatgggcatgcgttccattagctagttggggaggtaacggctcaccaaggcaacgatggataggggaactgagaggtttatcccccacactggaactgagacacggaccagactcctacgggaggcagcagtgaggaatattggtcaatgggcgagagcctgaaccagccaagtcgcgtgaaggaagactgccttatgggttgtaaacttcttttataagggaataaaagagattacgtgtaatctattgcatgtaccttatgaataa

SEQ ID NO: 8051 - DNA, 490 bp, unidentified
  misc_feature 1..490: note = Ascusbbf_1219931, encodes 16S rRNA
  source 1..490: mol_type = genomic DNA
agagtttgatcctggctcaggatgaacgccagcgggaggcctaacacatgcaagccgagcggtatttgttcttcggaacagagagagcggcgtacgggtgcggaacacgtgtgcaacctgcctttatcagggggatagcctttcgaaaggaagattaataccccataatatttaggatggcatcattttaaattgaaaactaaggtggataaagatgggcacgcgcaagattagatagttggtagggtaacggcctaccaagtcgatgatctttagggggcctgagagggtgatcccccacactggtactgagacacggaccagactcctacgggaggcagcagtgaggaatattggacaatgggtgagagcctgatccagccatcccgcgtgaaggacgacggccctatgggttgtaaacttcttttgtatagggataaacctttccacgtgtggaaagctgaaggtactatacgaataagcaccggct

SEQ ID NO: 8052 - DNA, 490 bp, unidentified
  misc_feature 1..490: note = Ascusbbf_30163, encodes 16S rRNA
  source 1..490: mol_type = genomic DNA
agagtttgatcatggctcaggatgaacgctagcggcaggcttaacacatgcaagtcgaggggcagcggggagtagcaatactctgccggcgaccggcaaaagggtgcgtaacgcgtgagcaacttgcccgtatccggggcataagcggtggaaacgccgtctaatttcccataacaacagaggccgcctgacctttgtttgaaagattcgtcggatacggataggctcgcgagacattagctagtcggcgtggtaacggcacaccgaggcgacgatgtctaggggttctgagaggaaggtcccccacactggaactgagacacggtccagactcctacgggaggcagcagtgaggaatattggtcaatgggcggaagcctgaaccagccatgccgcgtgaaggattgaggccctatgggtcgtaaacttcttttgtggtggagcaataagtgctacgtgtagcacgatgagagtacatcacgaataagca

SEQ ID NO: 8053 - DNA, 490 bp, unidentified
  misc_feature 1..490: note = Ascusbbf_62455, encodes 16S rRNA
  source 1..490: mol_type = genomic DNA
agagtttgatcatggctcagaacgaacgctggcggcgcgtcttaagcatgcaagtcgagcggcaagattggtgcttgcactgatcctagagcggcggactggtgagtaacgcgtgggtgacttgccctgaggatggggatagccggtagaaataccgggtaataccgaatacgttcccgtgagttagagttacgggaagaaaggagcttcggctccgcctgaggagaggcccgcgtactattagctagttggtgaggtaacggcccaccaaggcaacgatagttatccggcctaagagggtgaacggacacattgggactgagatacggcccagactcctacgggaggcagcagctaagaatattccgcaatggaggaaactctgacggagcgacgccgcgtggatgatgaaggccggaaggttgtaaaatccttttgtacgtgaggaataagttcaggaggtaatgcctggatggtgactgtagcgtaa

SEQ ID NO: 8054 - DNA, 490 bp, unidentified
  misc_feature 1..490: note = Ascusbbf_112230, encodes 16S rRNA
  source 1..490: mol_type = genomic DNA
agagtttgatcatggctcaggatgaacgctagcggcaggcttaacacatgcaagtcgaggggcatcgagtgtagcaatacatgtcggcgaccggcgaaagggtgagtaacgcgtgagcaacatacccgcagacgggggataggaggtggaaacgccttgtaataccccataagatacggagcggcatcgttttgtattgaaagattcattgtcagcggattggttcgcgtgccattaggtagacggcggggtaacggcccaccgtgccgacgatggctaggggttctgagaggaaggtcccccacattggaactgagacacggtccagactcctacgggaggcagcagtgaggaatattggtcaatggccgagaggctgaaccagccatgccgcgtgaaggatgaaggccctatgggtcgtaaacttcttttgtcgtggagcaataagggtcacgcgtggcccgatgagagtacacgtcgaataagcatc

SEQ ID NO: 8055 - DNA, 490 bp, unidentified
  misc_feature 1..490: note = Ascusbbf_115263, encodes 16S rRNA
  source 1..490: mol_type = genomic DNA
agagtttgatcatggctcaggatgaacgctagcggcaggcttaacacatgcaagtcgaggggcagcgcgttgtagcaatacgatggcggcgaccggcggaagggtgcgtaacgcgtgagcaacctgcccctgtcagggggatagtcgatggaaacgtcgcgtaataccccgtacgatgcgtgaccgcatggtcatgtattgaaagattcatcggacagggatgggctcgcgtgacattagctagtcggcggggtaacggcccaccgaggcgacgatgtctaggggttctgagaggaaggtcccccacactggaactgagacacggtccagactcctacgggaggcagcagtgaggaatattggtcaatggccgagaggctgaaccagccatgccgcgtgcaggaatgaggccctacgggtcgtaaactgcttttgcggtggagcaataaggtgtacgcgtacaccgatgagagtacatcgcgaataagca

SEQ ID NO: 8056 - DNA, 490 bp, unidentified
  misc_feature 1..490: note = Ascusbbf_724529, encodes 16S rRNA
  source 1..490: mol_type = genomic DNA
agagtttgatcatggctcaggacgaacgctggcggcgtgcctaacacatgcaagtcgaacgaggtaacaggaaagcttgctttcgctgacctagtggcgaacgggtgagtaacacgtgagaaacctgcctttgagtggggaataactcgaggaaactcgggctaataccgcatatcttcttcggaccgcatggtttgttgaagaaagaatttcgctcttagagggtctcgcggcctatcagctagttggtgaggtaactgctcaccaaggcaacgacgggtagctggattgagagatcgatcagccacactgggactgagacacggcccagactcctacgggaggcagcagtggggaatcttgcgcaatgggcgaaagcctgacgcagcaacgccgcgtgcggtgatgaaggccttcaaggttgtaaaccgctttcagcagggacgaaaatgacggtacctgcagaagaagccccggctaactacgtgcc

SEQ ID NO: 8057 - DNA, 490 bp, unidentified
  misc_feature 1..490: note = Ascusbbf_1670030, encodes 16S rRNA
  source 1..490: mol_type = genomic DNA
agagtttgatcatggctcaggacgaacgctggcggcgtgcttaacacatgcaagtcgagcggggtgcccctttcgaggggtggcctagcggcgaacgggtgagtaacacgtgggcaaccaaccctcagctctgggataactccgggaaactggggctaataccggataggacttccgcggacatccgcggtggtggaaaggttaagtccggctggggacgggcccgcggtctatcagcttgttggtgaggtaatggcttaccaaggcgacgacggatagccggcctgagagggtgaccggccacactgggacggagacacggcccagactcctacgggaggcagcagtggggaatcttgcgcaatgggcgaaagcctgacgcagcaacgccgcgtgggggaagaaggccttcgggttgtaaacccctttcggtggggacgaagcctgttttgcaggtgacggtacccgcaaaagaagcaccggctaacta

SEQ ID NO: 8058 - DNA, 490 bp, unidentified
  misc_feature 1..490: note = Ascusbbf_664591, encodes 16S rRNA
  source 1..490: mol_type = genomic DNA
agagtttgatcatggctcaggacgaacgctggcggcgtgcttaacacatgcaagtcgaacgctgaagctcctagcttgctgggggtggatgagtggcgaacgggtgagtaacacgtgagtaacctgccttgaacttcgggataagcgctggaaacggcgtctaataccggatatgacctgtcaccgcatggtggtgggtggaaagatttatcggttctagatggactcgcggcctatcagcttgttggtgaggtagtggctcaccaaggcgacgacgggtagccggcctgagagggtgaccggccacactgggactgagatacggcccagactcctacgggaggcagcagtggggaatattgcacaatggacgcaagtctgatgcagcaacgccgcgtgagggatgaatgccttcgggttgtaaacctcttttagtagggaagaagcgaaagtgacggtacctgcagaaaaagcaccggctaactacgtg

SEQ ID NO: 8059 - DNA, 490 bp, unidentified
  misc_feature 1..490: note = Ascusbbf_1446004, encodes 16S rRNA
  source 1..490: mol_type = genomic DNA
agagtttgatcctggctcaggataaacgctggcggcgcacataagacatgcaagtcgaacggacttaactcattcttaacgattgagagcggttagtggcggactggtgagtaatgtataagtaacctgcctatcagaggggaacaacagttggaaacgactgctaataccgcatatgccacgagaatcacatggttcaagtgggaaaggagcaatccgctgatagatggacttatatctgattagctagttggtggggtaacggcctaccaaggcgacgatcagtagccggactgagagggtacatgggcacagtgggaatggggtcagggccagactcctacgggaggcagcaggtgggaatattgcgcaatggaggaaactctgacgcagtgaagccgcgggcaggaagaaggttttcggattgtaaacggctttagacagggaagaaaaaagacagtacctgtagaataagctccggctaactacg

SEQ ID NO: 8060 - DNA, 490 bp, unidentified
  misc_feature 1..490: note = Ascusbbf_114920, encodes 16S rRNA
  source 1..490: mol_type = genomic DNA
agagtttgatcatggctcaggatgaacgctggcggcgtgcctaacacattcaagtcgaacggacgcgttcccttcgggggacaagttagtggcggacgggtgagtaatgcatgagcaacctgcctcgaagaggggaataacacagagaaatttgtgctaataccgcataatgtattcgggaggcatcttccggataagaaaggagcaatccgctttgagatgggctcatgtctgattagacagttggcggggtaacggcccaccaaatctacgatcagtagccggactgagaggttgaacggccacattgggactgagacacggcccagactcctacgggaggcagcagtggggaatattggacaatgggcgaaagcctgatccagcgacgccgcgtgaaggaagaaggtcttcggattgtaaactttagtgagcagggacgataatgacggtacctgcatagcaagccacggctaactacgtgccagca

SEQ ID NO: 8061 - DNA, 353 bp, unidentified
  misc_feature 1..353: note = Ascusbbf_1825117, encodes 16S rRNA
  source 1..353: mol_type = genomic DNA
agagtttgatcatggctcagaacgaacgctggcggcgcgttttaagcatgcaagtcgagcggcagtagcaatacgagagcggcggacgggtgagtaacacgtgggtaatctgcctaccagtcggggatagcctgtggaaacacaggataataccggatgcgatgccctgcacacaagtgcggggcaggaaaggggccaaggccccgctggaagatgagcccgcgtcccattagctagatggcggggtaaaggcccaccatggcgatgatgggtagccggcctgagagggtgaacggccacattggaactgagacacggtccagactcctacgggagccagcagccgcggtaat

SEQ ID NO: 8062 - DNA, 490 bp, unidentified
  misc_feature 1..490: note = Ascusbbf_1810899, encodes 16S rRNA
  source 1..490: mol_type = genomic DNA
agagtttgatcatggctcaggatgaacgccggcggtgtgcctaatacatgcaagtcgaacgcgttggcccgactgattgacgatgcttgcatctgattgacgacggtttaccaacgagtggcggacgggtgagtaacacgtaggcaacctgcccagaagcgggggacaacatttggaaacaagtgctaataccgcatgaatccgaaaaccgcatggttttcggctaaaagacggcttcggctgtcacttctggatgggcctgcggcgcattagttagttggtggggtaacggcctaccaagacgatgatgcgtagccgagttgagagactgatcggccacaatggaactgagacacggtccatactcctacgggaggcagcagtagggaatcttccacaatgggcgcaagcctgatggagcaacaccgcgtgagtgaagaagggtttcggctcgtaaaactctgttgttgaagaagaacgtgcgtgagag

SEQ ID NO: 8063 - DNA, 490 bp, unidentified
  misc_feature 1..490: note = Ascusbbf_376383, encodes 16S rRNA
  source 1..490: mol_type = genomic DNA
agagtttgatcctggctcaggatgaacgctagcgacaggcttaacacatgcaagtcgaggggcagcataaaagtagcaatactttggtggcgaccggcgcacgggtgagtaacgcgtatgcaacctacctatcagaggggaataacccggcgaaagtcggactaataccgcataaaacaggggcaccgcatggtgatatttgttaaagaaattcgctgatagatgggcatgcgttccattaggtagttggtgaggtaacggctcaccaagccgacgatggataggggaactgagaggttggtcccccacactggtactgagacacggaccagactcctacgggaggcagcagtgaggaatattggtcaatgggcgggagcctgaaccagccaagtcgcgtgaaggaagaaggatctatggttcgtaaacttcttttgcaggggaataaagtgcaggacgtgtcctgttttgtatgtaccctgagaataag

SEQ ID NO: 8064 - DNA, 490 bp, unidentified
  misc_feature 1..490: note = Ascusbbf_1879338, encodes 16S rRNA
  source 1..490: mol_type = genomic DNA
agagtttgatcatggctcaggataaacgctggcggcgtgcataacacattcaagtcgaacgaagcactttcgaacgagacttcggtcaagtttggatttgacttagtggcggacgggtgagtaacgcgtgagcaatctgccttggggtgcgggataacgtcgggaaactgacgctaataccgcatgacgcacggaggtcgcatgtcctccatgccaaagatttattgccctgagatgagctcgcgtccgattagacagttggcagggtaacggcctaccaaatcaacgatcggtagccggactgagaggttgaacggccacattggaactgagatacggtccagactcctactggaggcagcagtggggaatattgggcaatgggcgaaagcctgacccagcgacgccgcgtgagggaagaaggtcttcggattgtaaacctctttcagcagggaagaaggaagtgacggtacctgcagaagaagccacg

SEQ ID NO: 8065 - DNA, 490 bp, unidentified
  misc_feature 1..490: note = Ascusbbf_1519972, encodes 16S rRNA
  source 1..490: mol_type = genomic DNA
agagtttgatcatggctcagattgaacgctggcggcatgccttacacatgcaagtcgaacggcagcacgggtgcttgcacctggtggcgagtggcgaacgggtgagtaatacatcggaacgtaccttgtagtgggggatagctcggcgaaagccggattaataccgcatacgctctgaggaggaaagcgggggaccttcgggcctcgcgctacaagagcggccgatgtcagattagctagttggtggggtaaaagctcaccaaggcgacgatctgtagctggtctgagaggacgaccagccacactgggactgagacacggcccagactcctacgggaggcagcagtggggaattttggacaatgggcgaaagcctgatccagcaatgccgcgtgtgtgaagaaggccttcgggttgtaaagcacttttgtccggaaagaaatcctctgggttaatacctcggggggatgacggtaccggaagaataagc

SEQ ID NO: 8066 - DNA, 490 bp, unidentified
  misc_feature 1..490: note = Ascusbbf_33248, encodes 16S rRNA
  source 1..490: mol_type = genomic DNA
agagtttgatcatggctcaggatgaacgctagctacaggcttaacacatgcaagtcgagcggaacactttcgggtgtttagcggcagacgggtgagtaacacgtatccaacctttcccttacccgggtatagcctcgggaaactgagagtaatccccgatgtggtgcacgagaagcattttttgcgcacgaaagattcatcggtaaggggtggggatgcgttccattagttagtaggcggggcaacggcccacctagacgatgatggataggggttctgagaggaaggtcccccacattggaactgcgacacggtccaaactcctacgggaggcagcagtgaggaatattggtcaatggccggaaggctgaaccagccaagtagcgtgcaggatgacggccctatgggttgtaaactgcttttgtacgggaataacggtcgtcacgcgtgatgatgtgcatgtaccgtacgaataaggatcggctaactc

SEQ ID NO: 8067 - DNA, 490 bp, unidentified
  misc_feature 1..490: note = Ascusbbf_644655, encodes 16S rRNA
  source 1..490: mol_type = genomic DNA
agagtttgatcctggctcaggataaacgctggcggcgcacataagacatgcaagtcgaacgaacttaattttaatatttatattaaaaagcggttagtggcggactggtgagtaacgcgtaagcaatctacctattagaggggaataacagtgagaaatcattgctaataccgcatatgccatagacatcacatgatgacagtgggaaaggagcaatccgctaatagatgagcttgcgtctgattagcttgttggtggggtgatggcctaccaaggcgacgatcagtagccggactgaggggttgaacggccacattgggactgagatacggcccagactcctacgggaggcagcagtcgggaatattgcgcaatggaggaaactctgacgcagtgacgccgcgtataggatgaaggttttcggattgtaaactattgtcgttagggaagataaaagacagtacctaaggaggaagctccggctaactac

SEQ ID NO: 8068 - DNA, 490 bp, unidentified
  misc_feature 1..490: note = Ascusbbf_23748, encodes 16S rRNA
  source 1..490: mol_type = genomic DNA
agagtttgatcatggctcaggacgaacgctggcggcgtgcctaacacatgcaagtcgaacgagcgcaaggagcttgctccttgttgcgagtggcggacgggtgagtaacgcgtgaggaacctgcccttgagagggggataacgtccggaaacggacgctaataccgcataacatgttcaaatcgcatggtttgaacatcaaaggagcaatccgctgaaggatggcctcgcgtctgattagatagttggtgaggtaacggctcaccaagtcgacgatcagtagccggactgagaggttgatcggccacattgggactgagacacggcccagactcctacgggaggcagcagtgagggatattgcacaatgggggaaaccctgatgcagcaacgccgcgtgaaggaagacggttttcggattgtaaacttctgttttgggtgacgataatgacggtagcccgatagaaagccacggctaactacgtgccagc

SEQ ID NO: 8069 - DNA, 490 bp, unidentified
  misc_feature 1..490: note = Ascusbbf_65656, encodes 16S rRNA
  source 1..490: mol_type = genomic DNA
agagtttgatcctggctcaggacgaacgctggcggcgtgcttaacacatgcaagtcgaacgaagcttgaatttagatttcttcggaatgataaatgatatgactgagtggcggacgggtgagtaacgcgtgagcaacctgcccttcggagggggatagcgtttggaaacgaacggtaataccgcataatgttagggaatggcatctttccctaaccaaaactccggtgccgaaggatgggctcgcgttggattagatagttggtggggtaacggcctaccaagtcgacgatccatagccggactgagaggttgatcggccacattgggactgagacacggcccagactcctacgggaggcagcagtggggaatattgcacaatgggggaaaccctgatgcagcaacgccgcgtgaaggaagacggttttcggattgtaaacttctgttcttagggaagaagaaagtgacggtacctaaggagcaagccac

SEQ ID NO: 8070 - DNA, 490 bp, unidentified
  misc_feature 1..490: note = Ascusbbf_98949, encodes 16S rRNA
  source 1..490: mol_type = genomic DNA
agagtttgatcatggctcaggacgaacgctggcggtgtgcttaatacatgcaagtcgagcggagttaaggggcttgctccttaacttagcggcggacgggtgagtaacgcgcgagcaacctgcctatgtctggggaataacacagagaaatttgtgctaataccgcataagaccacagtggggcatcccacaggggtaaaagatttatcggatatagatgggctcacgtaccattagatagttggtagtgtaacggactaccaagtcgacgatggttagccgacctgagagggtgatcggccacattggaactgagatacggtccagactcctacgggaggcagcagtagggaatattcggcaatgggcgcaagcctgaccgagcaacaccgcgtgtgtgatgaaggtcttcggattgtaaagcactgtgatgggggacgaagaaagtgacggtaccccaagagcaagccacggctaactacgtgccagc

SEQ ID NO: 8071 - DNA, 490 bp, unidentified
  misc_feature 1..490: note = Ascusbbf_347717, encodes 16S rRNA
  source 1..490: mol_type = genomic DNA
agagtttgatcctggctcaggatgaacgctggcggcgtgcttaacacatgcaagtcgagcgagaagctcgtgaccaattcttcggaagcgagatcgagtggaaagcggcggacgggtgagtaacgcgtaggcaacctgccccgtacaaagggatagctactggaaacggtaattaatacctcataacacggttccatcgcatgttgggaccgtcaaagatttatcggtatgggatgggcctgcgtctgattagctggttggtggggtaacggctcaccaaggcgacgatcagtagccgacctgagagggtaaacggccacattggaactgagacacggtccaaactcctacgggaggcagcagtggggaatattgcacaatggggggaaccctgatgcagcaacgccgcgtgagcgaagaaggcctttgggtcgtaaagctctgtcctgaaggaagaagtaagtgacggtacttcaggaggaagccccgg

SEQ ID NO: 8072 - DNA, 490 bp, unidentified
  misc_feature 1..490: note = Ascusbbf_219183, encodes 16S rRNA
  source 1..490: mol_type = genomic DNA
agagtttgatcatggctcaggatgaacgctggcggcgtgcctaacacatgcaagtcgagcgggaaatccgtgacggatccttcgggtgacggatcggatggagagcggcggacgggtgagtaacgcgtaggtaacctgccctgtacagagggatagccactggaaacggtgattaatacctcataatgccggatctgcacatgcaggaccggtcaaagttttttcggtacaggatggacctgcgtctgattagctagttggtggggtaacggctcaccaaggcgacgatcagtagccgacctgagagggtgatcggccacattggaactgagacacggtccaaactcctacgggaggcagcagtggggaatattgcacaatgggggaaaccctgatgcagcaacgccgcgtgaacgaagaaggctcttgggtcgtaaagttctgttctgagggaagaagaaagtgacggtacctcaggagaaagccccgg

SEQ ID NO: 8073 - DNA, 490 bp, unidentified
  misc_feature 1..490: note = Ascusbbf_206115, encodes 16S rRNA
  source 1..490: mol_type = genomic DNA
agagtttgatcatggctcaggacgaacgctggcggcatgccttacacatgcaagtcgaacggacctagcaataggttagtggcgaacgggtgagtaatacatgagcaacctgcctcaaacagggggataacaccgggaaactggtgctaataccgcataagaccacagcgcggcatcgcgcaggggtaaaaacgattcagtggtttgagatgggctcatgtcccattagctagttggtgagataacagcccaccaaggcgacgatgggtagccgacctgagagggtgatcggccacattgggactgagacacggcccagactcctacgggaggcagcagtggggaatattgggcaatgggcgaaagccttacccagcaatgccgcgtgagtgaagaaggtcttcggattgtaaagctctttgatcagggacgaacacaatgacggtacctgaagaacaagccccggctaactacgtgccagcagccgcgg

SEQ ID NO: 8074 - DNA, 490 bp, unidentified
  misc_feature 1..490: note = Ascusbbf_234701, encodes 16S rRNA
  source 1..490: mol_type = genomic DNA
agagtttgatcctggctcaggacgaacgctggcggcgcgcctaacacatgcaagtcgaacggagatgggaaagcttgcttttccattttagtggcggacgggtgagtaacacgtgagcaacctgcctttcagagggggataacgtttggaaacgaacgctaataccgcataacatattcttgtggcatcacagggatatcaaaggagcaatccgctgagagatgggctcgcggccgattagatagttggcggggtaagggcccaccaagtcgacgatcggtagccggactgagaggttgaacggccacattgggactgagacacggcccagactcctacgggaggcagcagtggggaatattaggcaatgggggaaaccctgacctagcgacgccgcgtgagggaagacggtcttcggattgtaaacctctgtcttcagggacgaaaaagatgacggtacctgaagaggaagccacggctaactacgtgc

SEQ ID NO: 8075 - DNA, 490 bp, unidentified
  misc_feature 1..490: note = Ascusbbf_418033, encodes 16S rRNA
  source 1..490: mol_type = genomic DNA
agagtttgatcctggctcaggatgaacgctagcggcaggcctaatacatgcaagtcgaacggtaagtattttagcaataggatacgagagtgacgtacgggtgcgtaacacgtatgcaacctacccaaaacaggaggatagctcagggaaacttggattaaccctccataagatcgtgccttggcatcagggagcgataaaaaccgcgaggtggttttggatgggcatgcgcatgattagttagttggtagtgtaacggactaccaagacgatgatcattaggggacctgagagggtgatcccccacactggcactgagatacgggccagactcctacgggaggcagcagtagggaatattggtcaatggatggaagtctgaaccagccatgccgcgtgcaggaagacggccttctgggttgtaaactgcttttgccaggggataaaaggcccatgcgtgggacattgaaggtacctggtgaataagcca

SEQ ID NO: 8076 - DNA, 490 bp, unidentified
  misc_feature 1..490: note = Ascusbbf_1226096, encodes 16S rRNA
  source 1..490: mol_type = genomic DNA
agagtttgatcctggctcaggatgaacgctagcggcaggcctaacacatgcaagtcgagggctagacatcttcggatgttgagaccggcgcacgggtgcgtaacgcgtatgcaatctaccttttactaagggatagcccagagaaatttggattaataccttatagtatgtttgaatggcatcgtttagacattaaagatttattggtaaaagatgagcatgcgtcccattagttagttggtaaggtaacggcttaccaagacgatgatgggtaggggtcctgagagggagatcccccacactggtactgagacacggaccagactcctacgggaggcagcagtgaggaatattggtcaatggaggcaactctgaaccagccatgccgcgtgcaggatgacggtcctatggattgtaaactgcttttgtacaggaagaaaaagagtcacgtgtggcttattgacggtactgtaagaataaggatcggcta

SEQ ID NO: 8077 - DNA, 490 bp, unidentified
  misc_feature 1..490: note = Ascusbbf_130070, encodes 16S rRNA
  source 1..490: mol_type = genomic DNA
agagtttgatcctggctcaggatgaacgctagcggcaggcttaacacatgcaagtcgaggggcagcgagatgtagcaatacattgtcggcgaccggcagacgggtgcgtaacgcgtatgcaacctacccaccacaggggtatagcccggcgaaagccggaataatcccccatggttccaacccaccgcatgatgagttggataaacccgcgagggggtgatggatgggcatgcgtggcattaggcagttggcggggtaacggcccaccaaaccgacgatgcctaggggtcctgagagggaggtcccccacattggaactgagacacggtccaaactcctacgggaggcagcagtgaggaatattggtcaatgggcgagagcctgaaccagccatgccgcgtgcaggaagacggccttatgggttgtaaactgcttttattggggacgagcatgagtacgcgtactcaaatgacggtacccgatgaataag

SEQ ID NO: 8078 - DNA, 490 bp, unidentified
  misc_feature 1..490: note = Ascusbbf_113777, encodes 16S rRNA
  source 1..490: mol_type = genomic DNA
agagtttgatcatggctcaggatgaacgctggcggcgtgcctaatacatgcaagtcgatcgcactacttcggtagtgagaggcgaacgggtgagtaacacgtaggtaacatgtccatatgacgaggataacggttggaaacgactgctaagactggataggagtagaggaggcatctcttctactttaaaggactcgaaagagtacgcgtatggagtgacctgcggcgcattagttagttggtggggtagaggcctaccaagacgatgatgcgtagccggactgagaggttgaacggccacattgggactgagacacggcccagactcctacgggaggcagcagtagggaattttcggcaatggggggaaccctgaccgagcaacgccgcgtgaatgacgaagtacttcggtatgtaaagttcttttattaaggaagaaagtgcagtggaaaaactgtatagacggtacttattgaataagccccggcta

SEQ ID NO: 8079 - DNA, 490 bp, unidentified
  misc_feature 1..490: note = Ascusbbf_723739, encodes 16S rRNA
  source 1..490: mol_type = genomic DNA
agagtttgatcatggctcaggatgaacgctggcggcgtgcctaacacatgcaagtcgaacggagatagaacgctgtcgagacttcggtcaaaacttgttttatcttagtggcggacgggtgagtaacgcgtggagaacctgcctcgtactgggggataacagttggaaacgactgataataccgcataagcccacgagaccgcatggtcatgagggaaaagatttatcggtacgagatggatccgcgtctgattagccagttggcggggtaacggcccaccaaagcgacgatcagtagccggcctgagagggcggacggccacattgggactgagacacggcccaaactcctacgggaggcagcagtgggggatattgcacaatgggggaaaccctgatgcagcgacgccgcgtgagtgaagaagtatttcggtatgtaaagctctatcagcagggaagaaaggcctcgcaagaggagatgacggtacct

SEQ ID NO: 8080 - DNA, 490 bp, unidentified
  misc_feature 1..490: note = Ascusbbf_467110, encodes 16S rRNA
  source 1..490: mol_type = genomic DNA
agagtttgatcatggctcaggacgaacgctggcggcgtgcctaatacatgcaagtcgagcgaatgattagagaagcttgcttctctctgatttagcggcggacgggtgagtaacacgtgggtaacctaccctatagactgggataacttcgggaaaccggagctaataccggataatacttcgaaacacatgttttgaagttgaaagatggtttcggctatcactataggatggacccgcggcgcattagctagttggtgaggtaacggctcaccaaggcaacgatgcgtagccgacctgagagggtgatcggccacactgggactgagacacggcccagactcctacgggaggcagcagtagggaatcttccacaatggacgaaagtctgatggagcaacgccgcgtgagtgaagaaggatttcggttcgtaaaactctgttgcaagggaagaacaagtagcgtagtaactggcgctaccttgacggta

SEQ ID NO: 8081 - DNA, 490 bp, unidentified
  misc_feature 1..490: note = Ascusbbf_678003, encodes 16S rRNA
  source 1..490: mol_type = genomic DNA
agagtttgatcatggctcaggatgaacgctggcggcgtgcttaacacatgcaagtcgaacggtgaaagaagagcttgctcttctggatcagtggcgaacgggtgagtaacacgtgagcaacctgcccttcactctgggataacacttggaaacaggtgctaataccggatacaagcctcggaggcatctccagaggctggaaagaacctcggtgagggatgggctcacggcctatcaggtagttggtgaggtaaaggctcaccaagccgacgacgggtagccggcctgagagggtgaccggccacactgggactgagacacggcccagactcctacgggaggcagcagtggggaatattgcacaatgggcgaaagcctgatgcagcaacgccgcgtgagggatgacggccttcgggttgtaaacctcttttagcaaggaagaagcgaaagtgacggtacttgcagaaaaagcgccggctaactacgtgcc

SEQ ID NO: 8082 - DNA, 490 bp, unidentified
  misc_feature 1..490: note = Ascusbbf_1542555, encodes 16S rRNA
  source 1..490: mol_type = genomic DNA
agagtttgatcctggctcaggacgaacgctggcggcgcgcctaacacatgcaagtcgaacggaactagtgaccagaggctagaattgatctggtctgtggtcactagttcagtggcggacgggtgagtaaagcatgagcaacctgcctaatagagggggatagcttttggaaacagaagataataccgcatgaatcagagatttcgcatgaagtttttggaaaaggagcaatccgctattagatgggctcatgtccgattagctagttggtgaggtaatggcttaccaaggcgacgatcggtagccgtactgagaggttcaacggccacattgggactgagacacggcccagactcctacgggaggcagcagtgaggaatattgcgcaatggaggaaactctgacgcagcgacgccgcgtgaaggaagaaggtcttcggattgtaaacttctgtcctcagggaagaaacaaatgacggtacctgaggagg

SEQ ID NO: 8083 - DNA, 490 bp, unidentified
  misc_feature 1..490: note = Ascusbbf_1334350, encodes 16S rRNA
  source 1..490: mol_type = genomic DNA
agagtttgatcctggctcaggacgaacgctggcggcgtgcttaacacatgcaagtcgaacgaagcactgaaattgatttcttcggaatgatttttctttgactgagtggcggacgggtgagcaacacgtgagcaacctgcctttcagagcgggatagcagttggaaacgactgataataccgcatgacatgttttctccgcatgaggaaaacatcaaatgatttttcgctgaaagatgggctcgcgtccgattaggtagttggtgaggtaacggctcaccaagccgacgatcggtagccggactgagaggtcgatcggccacattgggactgagacacggcccagactcctatgggaggcagcagtgggggatattgcacaatgggcgcaaggctgatgcagcaacgccgcgtgagggaggacggtcttcggattgtaaagctctgttgtcggggacgaaggggcagatcaggaaatgggtgtgcttaga

SEQ ID NO: 8084 - DNA, 490 bp, unidentified
  misc_feature 1..490: note = Ascusbbf_114578, encodes 16S rRNA
  source 1..490: mol_type = genomic DNA
agagtttgatcatggctcaggacgaacgctggcggcgtgcttaacacatgcaagtcgaacgaggttattggagagcttgctcgaagataaccgagtggcggacgggtgagtaacgcgtgaacaatctgtctcacacaggggaataacgcatcgaaagatgtgctaataccgcataggaccacagcatcgcatggtgcagaggtgaaaggagcaatccggtgtgaggtgagttcgcgtctgattagatagttggtgaggtaacggcccaccaagtcaacgatcagtagccgacctgagagggtgatcggccacattgggactgagacacggcccagactcctacgggaggcagcagtggggaatattgggcaatgggcgcaagcctgacccagcaacgccgcgtgaaggaagaaggttttcggatcgtaaacttctgtcctatgagaagatagtgacggtatcataggaggaagccccggctaactacgtg

SEQ ID NO: 8085 - DNA, 490 bp, unidentified
  misc_feature 1..490: note = Ascusbbf_72445, encodes 16S rRNA
  source 1..490: mol_type = genomic DNA
agagtttgatcctggctcaggatgaacgctggcggcgcgcctaacacatgcaagtcgaacggtgaagtcccttcgggggctgatcagtggcggacgggtgagtaacgcgtgaggaacctgcccttatgagcggaataacgtcgggaaactgacgctaataccgcataatgcatcaccggggcatcgcggtgatgccaaagcttcggcgcataaggatggactcgcgtcccattagatagttggcggggcaacggcccaccaagtcagcgatgggtagccggactgagaggttgaacggccacattggaactgagagacggtccagactcctacgggaggcagcagtggggaatattgggcaatgggcggaagcctgacccagcgacgccgcgtgagcgaagaaggtcttcggattgtaaagctctgtgtacagggacgataatgacggtacctgtatagaaagccacggctaactacgtgccagcagccg

SEQ ID NO: 8086 - DNA, 490 bp, unidentified
  misc_feature 1..490: note = Ascusbbf_455769, encodes 16S rRNA
  source 1..490: mol_type = genomic DNA
agagtttgatcatggctcaggatgaacgctggcggcgtgcctaatacatgcaagtcgaacgaattaccttcgggtagttagtggcgaacgggtgagtaacacgtagataacctacctttaactcgaggataactttgggaaaccggagctaatactggataggatgtgcttatgaaaaaaacacatttaaagattaatcggtttaagaggggtctgcggcgcattagttagttggtggggtaaaggcctaccaagacaatgatgcgtagccggactgagaggtctaccggccacattgggactgagaacggcccaaactcctacgggaggcagcagtagggaattttcggcaatggggggaaccctgaccgagcaacgccgcgtgaacgacgaagtacttcggtatgtaaagttcttttatatgggaagaaaaagcaattattgacggtaccatatgaataagccccggctaactatgtgccagcagccg

SEQ ID NO: 8087 - DNA, 488 bp, unidentified
  misc_feature 1..488: note = Ascusbbf_601589, encodes 16S rRNA
  source 1..488: mol_type = genomic DNA
agagtttgatcctggctcagaacgaacgctggcggcaggcttaacacatgcaagtcgagcgccccgcaaggggagcggcagacgggtgagtaacgcgtgggaatctacccatctctacggaataactcagggaaacttgtgctaataccgtatacgcccttcgggggaaagatttatcggagatggatgagcccgcgttggattagctagttggcggggtaacggctcaccaaggcaacgatcagtaggggttctgagaggaaggtcccccacattggtactgagacacggaccaaactcctacgggaggcagcagtgaggaatattggtcaatgggcgcaagcctgaaccagccaagtagcgtgcaggatgactgccctatgggttgtaaactgcttttatacggggataaagtcagggtcgtgaccctgtttgcaggtaccgtatgaataaggaccggctaattccgtgccagcagccgcggtaat

SEQ ID NO: 8088 - DNA, 490 bp, unidentified
  misc_feature 1..490: note = Ascusbbf_562234, encodes 16S rRNA
  source 1..490: mol_type = genomic DNA
agagtttgatcctggctcaggatggacgctagcggcaggcttaacacatgcaagtcgaggggcagcactggtagcaatacttggtggcgaccggcgcaagggtgcgtaacgcgtgagcaacatgcccgtatcagggggataatccagggaaacttggtctaataccccatagtaagtttttgaggcatctcaaggattttaaagctttggtggatacggattggctcgcgtgacattagctagatggtaaggtaacggcttaccatggctacgatgtctaggggttctgagaggaaggtcccccacactggaactgagacacggtccagactcctacgggaggcagcagtgaggaatattggacaatggatggaaatctgatccagccatgccgcgtgcaggaagacggccctatgggttgtaaactgcttttgtatgggagcaataagatctacgtgtagattgatgagagtaccatacgaataagcac

SEQ ID NO: 8089 - DNA, 490 bp, unidentified
  misc_feature 1..490: note = Ascusbbf_1371795, encodes 16S rRNA
  source 1..490: mol_type = genomic DNA
agagtttgatcatggctcaggatgaacgctggcggcgtgcttaacacatgcaagtcgaacggagttatctcgctgaggagagcttgctcaaatcttgagataacttagtggcggacgggtgagtaacgcgtggataacctgccttataccgggggataacacttagaaataggtgctaataccgcataagcgcacgatcccgcatgggaaagtgtgaaaaactccggtggtataagatcgatccgcttctgattagatagttggtgaggtaacggccaaacaagtcaacgatcagtagccgggctgagaggatgaacgacaacattgggactgagaaacggcccaaaatcctacgggaggaagcagtggggaagagtgcacaatgggggaaaccctgctgcagcgacgccgcgtgagtgaagaagtatttcggtatgtaaagctctatcagcaaggaagaaaaaaatgacggtacttgactaagaagccc

SEQ ID NO: 8090 - DNA, 490 bp, unidentified
  misc_feature 1..490: note = Ascusbbf_1331, encodes 16S rRNA
  source 1..490: mol_type = genomic DNA
agagtttgatcatggctcaggacgaacgctggcggcgtgcctaacacatgcaagtcgaacggagcgaaaagagcttgctcttggagcttagtggcggacgggtgagtaacacgtgagcaacctgcctttcagagtggaataatgtttggaaacggacactaataccgcataacatattgaatctgcatggatttaatatcaaaggagcaatccgctgaaagatgggctcgcgtctgattagccagttggcggggtaacggcccaccaaagcgacgatcagtagccggactgagaggttgaacggccacattgggactgagacacggcccagactcctacgggaggcagcagtgggggatattgcacaatgggggaaaccctgatgcagcaacgccgcgtgcaggatgacggtcttcggattgtaaactgttgtcctctgtgacgataatgacggtagcagaggaggaagccacggctaactacgtgccag

SEQ ID NO: 8091 - DNA, 490 bp, unidentified
  misc_feature 1..490: note = Ascusbbf_32719, encodes 16S rRNA
  source 1..490: mol_type = genomic DNA
agagtttgatcatggctcagaacgaacgctggcggcgcgtcttaagcatgcaagtcgagcggtaagacagtagcttgctactgtcctagagcggcggactggtgagtaacgcgtgggtgacgtaccctgaggacggggatagcctgtggaaacacagggtaataccggataagctcgtatgtgtcagaggcatacgaggaaaggttcttttgaaccgccttaggagcggcccgcgggctattagctagttggcggggtaacggcccaccaaggcgacgatagctacccggcctaagagggtgaacgggcacattgggactgagatacggcccagactcctacgggaggcagcagctaagaatattccgcaatgggggaaaccctgacggagcgacgccgcgtggatgatgaaggccggaaggttgtaaaatccttttggaagcgaggaataattaaagtgagagaaacgctttgaggtgacggtagcttc

SEQ ID NO: 8092 - DNA, 490 bp, unidentified
  misc_feature 1..490: note = Ascusbbf_49230, encodes 16S rRNA
  source 1..490: mol_type = genomic DNA
agagtttgatcctggctcaggatgaacgctagcggcaggcttaacacatgcaagtcgaggggcagcgggtccagcaatggatgccggcgaccggcgaaagggtgagtaacgcgtgagcaacatgcccgacactgggggatagtcgatggaaacgtcgcgtaataccccgtaacacaggaggccgcatgaccttctgttgaaagattcattggtgtcggattggctcgcgtgccattaggtagacggcggggtaacggcccaccgtgccgacgatggctaggggttctgagaggaaggtcccccacattggaactgagacacggtccagactcctacgggaggcagcagtgaggaatattggacaatggccggaaggctgatccagccatgccgcgtgcgggatgaatgccctatgggttgtaaaccgcttttgccggggagcaataaggtccacgtgtggaccgacgagagtacccggcgaataagcatc

SEQ ID NO: 8093 - DNA, 490 bp, unidentified
  misc_feature 1..490: note = Ascusbbf_456340, encodes 16S rRNA
  source 1..490: mol_type = genomic DNA
agagtttgatcctggctcaggatgaacgctggcggcgtgcttaacacatgcaagtcgaacggagtatatgtgaaacttacgttgatcatatacttagtggcggacgggtgagtaacgcgtgggtaacctacctcacacagggggataacagttggaaacgactgctaaaaccgcataacatggcgataccgcatgacattgccatcaaatatttataggtgtgagatgggcccgcgtctgattagctagttggtgaggtaacggcccaccaaggcgacgatcagtagccggcttgagagagtgaacggccacattgggactgagacacggcccaaactcctacgggaggcagcagtgggggatattggacaatgggggaaaccctgatccagcgacgccgcgtgagtgaagaagtatttcggtatgtaaagctctatcagcagggaagaaaaagcgcaagcattgactgtacctgactaagaagccccgg

SEQ ID NO: 8094 - DNA, 490 bp, unidentified
  misc_feature 1..490: note = Ascusbbf_188521, encodes 16S rRNA
  source 1..490: mol_type = genomic DNA
agagtttgatcatggctcaggatgaacgctggcggcaggcttaatacatgcaagtcgaacggtaaggtccgaggtagcaataccgaggatacacgagtggcgcacgggtgcgtaacgcgtatgcaacctacctttgactggaacataacgttgagaaatcggcgctaatattccatgtggttatgacccggcatcgggatgtaactaaagatttattggtcaaggatgggcatgcgtatcattagctagttggcggggtaacggcccaccaaggcgacgatgattaggggttctgagaggattaccccccacactggaactgagacacggtccagactcctacgggaggcagcagtagggaatattgggcaatggaggcaactctgacccagccatgccgcgtgcaggaagacggccctatgggttgtaaactgcttttgtcatggagtaaggcgggggacgtgtcccccgttgcaagtacatgacgaat

SEQ ID NO: 8095 - DNA, 490 bp, unidentified
  misc_feature 1..490: note = Ascusbbf_251630, encodes 16S rRNA
  source 1..490: mol_type = genomic DNA
agagtttgatcctggctcagattgaacgctagcgggatgccttacacatgcaagtcgaacggcagcataagagagcttgctctcttgatggcgagtggcgaacgggtgagtaatgtatcggaacgtgcccagtagcgggggataactacgcgaaagcgtagctaataccgcatacgccctacgggggaaaggaggggatccgcaaggacctttcactattggagcggccgatatcggattagctagttggtgaggtaagggctcaccaaggcgacgatccgtagctggtttgagaggacgaccagccacactgggactgagacacggcccagactcctacgggaggcagcagtggggaattttggacaatgggggaaaccctgatccagccatctcgcgtgtgcgatgaaggccttcgggttgtaaagcacttttgtcagggaagaaaagttttttgctaataccagaaaacgctgacggtacctgaaga

SEQ ID NO: 8096 - DNA, 490 bp, unidentified
  misc_feature 1..490: note = Ascusbbf_510118, encodes 16S rRNA
  source 1..490: mol_type = genomic DNA
agagtttgatcatggctcaggatgaacgctagcggcaggcttaacacatgcaagtcgaggggcagcgcggggtagcaatactctggcggcgaccggcggaagggtgagtaacgcgtgagcaacatgcccgtaagcgggggatagtcggtggaaacgccgcgtaataccccgtaacacttgaggcggcatcgcctgaagttgaaagattaatcgcttacggattggctcgcgtgccattaggtagacggcggggtaacggcccaccgtgccgacgatggctaggggttctgagaggaaggtcccccacattggaactgagacacggtccagactcctacgggaggcagcagtgaggaatattggacaatggccggaaggctgatccagccatgccgcgtgacggaatgaggccctacgggtcgtaaacgtcttttagtcgggagcaataaggggcacgcgctgtcccgatgagagtaccgattgaataagc

SEQ ID NO: 8097 - DNA, 474 bp, unidentified
  misc_feature 1..474: note = Ascusbbf_118302, encodes 16S rRNA
  source 1..474: mol_type = genomic DNA
agagtttgatcctggctcagagtgaacgctggcggcatgcttaacacatgcaagtcgtgcggggggtttcggcccctagcggcggacgggtgagtaacgcgtagggatgtgtccagaggtgggggataacgctgggaaactggcgctaataccgcatgcgggctgaggcccaaagccttcgggcgcctttggagtaacctgcgtccgattagctagttggtggggtaaaggcctaccaaggcgacgatcggtagctggtctgagaggacgatcagccacactgggactgagacacggcccagactcctacgggaggcagcagtggggaatattggacaatgggcgcaagcctgatccagcaatgccgcgtgggtgaagaaggtcttcggatcgtaaagccctttcggcggggacgatgatgacggtacccgcagaagaagccccggctaacttcgtgccagcagccgcggtaat

SEQ ID NO: 8098 - DNA, 490 bp, unidentified
  misc_feature 1..490: note = Ascusbbf_1535975, encodes 16S rRNA
  source 1..490: mol_type = genomic DNA
agagtttgatcatggctcaggacgaacgctggcggcgtgcttcatacatgcaagtcgaacgataaggtctcttcggagatacataagtggcggacgggtgagtaaaatgtagagaatctaccttcaagagggggacaacgattggaaacgatcgctaataccccatatgcgcgtacctgagatggtattcgtgaaagctccggtgcttggagatgagtctgcatctgattagctagttgagggtgtaatggaccaccaaggcgacgatcagtagctggtttgagaggatgatcagccacaatgggactgagacacggcccatactcctacgggaggcagcagtagggaattttgcgcaatgggcgaaagcctgacgcagcaacgccgcgtgatcgagacgcttttcggagtgtaaagatctgtcaatagggacgaacaaatgacggtacctatagaggaagcaccggctaactccgtgccagcagccgcg

SEQ ID NO: 8099 - DNA, 490 bp, unidentified
  misc_feature 1..490: note = Ascusbbf_388160, encodes 16S rRNA
  source 1..490: mol_type = genomic DNA
agagtttgatcatggctcaggatgaacgctagcggcaggcctaatacatgcaagtcggacggtattcccccttcgggggggagagagtggcgcacgggtgcgtaacgcgtatgcaacctgccccttactgggggatagcccggggaaacccggattaataccccatgttgcggagctccggcatcggaattccgccaaaggcctcggccggtaagggatgggcatgcgtaggattagctagttggcggtgtaacggaccaccaaggcttcgatccttaggggttctgagaggaaggtcccccacactggcactgagatacgggccagactcctacgggaggcagcagtagggaatattgggcaatgggcggtagcctgacccagccatgccgcgtgcaggaagacggcgttctgcgttgtaaactgcttttatacgggaagaaaaggcccatgcgtgggacattgccggtaccgtatgaataagcaccgg

SEQ ID NO: 8100 - DNA, 490 bp, unidentified
  misc_feature 1..490: note = Ascusbbf_556388, encodes 16S rRNA
  source 1..490: mol_type = genomic DNA
agagtttgatcctggctcaggatgaacgctggcggcgtgcctaacacatgcaagtcgagcgggaatctgttgattgaaacttcggtcgaaagaagcagaggatggcggcggacgggtgagtaacgcgtaggtaacctgccccttacacagggatagcctcgggaaactgggattaatacctgataaagcgtcggagtcacatggctctgacgccaaagatttatcggtgagggatggacctgcgtctgattagctggttggtgaggtaacggcccaccaaggcaacgatcagtagccgacctgagagggtaatcggccacattggaactgagacacggtccaaactcctacgggaggcagcagtagggaatattgcacaatgggcgcaagcctgatgcagcaacgccgcgtgagcgaagaaggtcttcggatcgtaaagctctgtcctgaggaacgaagaagtgacggtacctcgggaggaagccccggc

SEQ ID NO: 8101 - DNA, 490 bp, unidentified
  misc_feature 1..490: note = Ascusbbf_671375, encodes 16S rRNA
  source 1..490: mol_type = genomic DNA
agagtttgatcctggctcaggatgaacgctagctacaggcttaacacatgcaagtcgaggggcatcatggcggtggcttgccaccgccgatggcgaccggcgcacgggtgagtaacgcgtatccaacctgcccccaaccgcggcacagcccgccgaaaggcggattaattccgcatgtggtcgtgatgtgacatcttttcacgactaaaggttcactccggttggggatggggatgcgtccgattaggcagcaggcggggtgacggccacctggccgacgatcggtaggggttctgagaggaaggtcccccacactggtactgagacacggaccagactcctacgggaggcagcagtgaggaatattggtcaatgggcggaagcctgaaccagccaagtagcgtgagggatgacggccctacgggttgtaaacctctttttcgcggggataaacttcgggacttgtcccgttttgcaggtaccgcgtgaa

SEQ ID NO: 8102 - DNA, 490 bp, unidentified
  misc_feature 1..490: note = Ascusbbf_639488, encodes 16S rRNA
  source 1..490: mol_type = genomic DNA
agagtttgatcatggctcaggatgaacgctagcggcaggcttaacacatgcaagtcgaggggcaacgcgagtagcaatacttggcggcgaccggcgcaagggtgcgtaacgcgtgagcaacatgcccgtatcagggggataatccagggaaacttggtctaataccccatagtaattttgtaaggcatcttataagatttaaagctttggtggatacggattggctcgcgtgacattagctggatggtaaggtaacggcttaccatggctatgatgtctaggggttctgagaggaaggtcccccacactggaactgagacacggtccagactcctacgggaggcagcagtgaggaatattggacaatggatggaaatctgatccagccatgccgcgtgaaggaagaaggtcctatggattgtaaacttcttttgtatgggagcaataaggcctacgagtaggttgatgagagtaccatacgaataagcac

SEQ ID NO: 8103 - DNA, 362 bp, unidentified
  misc_feature 1..362: note = Ascusbbf_1635522, encodes 16S rRNA
  source 1..362: mol_type = genomic DNA
agagtttgatcctggctcaggatgaacgctagcggcaggcttaatacatgcaagtcgaacggtaacatagagtagcaatactctgatgacgagtggcggatgggtgcgtaacgcgtatgtgacctacccatattcgggacaaaacatcgagaaattggtgctaatatcctatatgtctacgagctgcatggtttgtagatgaaagtcgcgagatgaatatggatgggcatgcgtgccattagctagttggtaaggtaacggcttaccaaggcgacgatggctaggggctctgagaggattaccccccacattggaactgagacacggtccaaactcctacgggagccagcagccgcggtaat

SEQ ID NO: 8104 - DNA, 490 bp, unidentified
  misc_feature 1..490: note = Ascusbbf_659346, encodes 16S rRNA
  source 1..490: mol_type = genomic DNA
agagtttgatcatggctcaggatgaacgctagcggcaggcctaacacatgcaagtcgaggggtatttggagcttgctccaaagagaccggcgcacgggtgcgtaacgcgtatgcaatctaccttatactaagggatagcccggagaaatccggattaataccttatagttaatttggttggcatcagccgaattataaagatttatcggtataagatgagcatgcgtcccattagttagttggtgtggtaacggcataccaagacgatgatgggtaggggtcctgagagggagatcccccacactggtactgagacacggaccagactcctacgggaggcagcagtgaggaatattggtcaatggaggcaactctgaaccagccatgccgcgtgcaggaagaatcatctatggtgtgtaaactgcttttgtacgggaagaaaaagaattacgagtaatttattgacggtaccgtaagaataaggatcggc

SEQ ID NO: 8105 - DNA, 490 bp, unidentified
  misc_feature 1..490: note = Ascusbbf_1377159, encodes 16S rRNA
  source 1..490: mol_type = genomic DNA
agagtttgatcatggctcaggatgaacgctagcgataggccttacacatgcaagtcgaggggcagcacaaagaatcgtagcaatacaatttttggtggcgaccggcgcacgggtgagtaacgcgtatgcaacctacctactactttggcatagctcgttgaaagacgaattaataccttataatacaggggctccgcatggagatatttgttaaagatttatcggtagtagatgggcatgcgttccattagttagttggcgaggtaacggctcaccaagacaacgatggataggggaactgagaggattgcaccccacactggaactgagacagggtccagactcctacgggaggcagcagtgaggaatattggtcaatggaggagactctgaaccagccaagtcgcgtgaaggatgactgccctacgggttgtaaacttcttttttaagggaataaagtgagctacgtgtagctttttgcaagtacctt

SEQ ID NO: 8106 - DNA, 490 bp, unidentified
  misc_feature 1..490: note = Ascusbbf_1558216, encodes 16S rRNA
  source 1..490: mol_type = genomic DNA
agagtttgatcctggctcaggatgaacgctagcggcaggcttaacacatgcaagtcgaggggcagcggggtagcaataccgccggcgaccggcaaacgggtgcggaacacgtacgcaacttaccctaaactggtgaatagccttcggaaacgaagattaatacaccgtaaaatagttgagtggcatcacttgattataatagctccggcggtttaggatgggcgtgtgtcccattagctagttggtaaggtaacggcttaccaaggcgacgatgggtaactggtgtgagagcacgaccagtcacacgggcactgagacacgggcccgactcctacgggaggcagcagtgaggaatattggtcaatggacgcaagtctgaaccagccatgccgcgtgaaggatgaaggcgttctgcgttgtaaacttcttttatctgggaagaaacctccgatttctattggagccgacggtaccagaggaataagcaccg

SEQ ID NO: 8107 - DNA, 490 bp, unidentified
  misc_feature 1..490: note = Ascusbbf_1270773, encodes 16S rRNA
  source 1..490: mol_type = genomic DNA
agagtttgatcatggctcaggatgaacgctagcgataggcttaacacatgcaagtcgaggggcagcattggcgtagtttactacaacagatggcgaccggcggatgggtgagtaacgcgtatgcaacctaccctctacagggggatagcccgaagaaattcggattaacaccgcataataatttagggtcgcatgattttagatttaaaaatttattggtagaggatgggcatgcgttccattagttagttggtaaggtaacggcttaccaagacatcgatggataggggaactgagaggtttatcccccacactggaactgagatacggtccagactcctacgggaggcagcagtgaggaatattggtcaatgggcgaaagcctgaaccagccaagtcgcgtgaaggaagacggttctatggattgtaaacttcttttataagagagtaaaggacggtacgcgtactgttttgcaagtatcttatgaat

SEQ ID NO: 8108 - DNA, 490 bp, unidentified
  misc_feature 1..490: note = Ascusbbf_18828, encodes 16S rRNA
  source 1..490: mol_type = genomic DNA
agagtttgatcatggctcaggatgaacgctggcggcgtgcctaatacatgcaagtcgaacgcatatcttcgggtatgagtggcgaacgggtgagtaacacgtaggtaacctgcccataagacgaggataactactggaaacggtagctaatactggatagtatatagaatcgcatgattttatatttaaagatgcctcaaagcatcacttatggatggacctgcggtgcattagctagttggtgagataacggcccaccaaggcgacgatgcatagccggactgagaggttgaacggccacattgggactgagacacggcccagactcctacgggaggcagcagtagggaattttcggcaatggacgcaagtctgaccgagcaacgccgcgtgagtgatgaagttcttcggaacgtaaaattcttttatttggaaaaaacgtatagtgtaggaaatgacattatagtgatggtaccaaatgaataagccc

SEQ ID NO: 8109 - DNA, 490 bp, unidentified
  misc_feature 1..490: note = Ascusbbf_33524, encodes 16S rRNA
  source 1..490: mol_type = genomic DNA
agagtttgatcatggctcaggatgaacgctggcggcgtgcctaatacatgcaagtcgaacgggagtgcttgcactccagtggcgaacgggtgagtaacacgtaggtaatctagcattaagacgaggatagcttctagaaatgggagataatactggataggaaattttcctgcatggggaaatttttaaagatttatcgcttaatggggagcctgcggtgcattagctagatggtgagggtaacggcccaccatggcgatgatgcatagccggtctgagaggacgaacggccacattgggactgagaacggcccaaactcctacgggaggcagcagtagggaattttcggcaatgggcggaagcctgaccgagcaacgccgcgtgattgaagaagtatttcggtatgtaaaaatcttttatttgggacgaaaaaatcaaaattgacggtaccaaatgaataagccccggctaactacgtgccagcagccg

SEQ ID NO: 8110 - DNA, 490 bp, unidentified
  misc_feature 1..490: note = Ascusbbf_725231, encodes 16S rRNA
  source 1..490: mol_type = genomic DNA
agagtttgatcctggctcagaacgaacgctggcggcgtgcttaacacatgcaagtcgaacggagtattcctcccgcagattgaagaagcttgcttctgattgaagcatttggaatacttagtggcggacgggtgagtaacgcgtgggtaacctgcctcacactgggggatagcagttggaaacgactgataataccgcataagcgcacagtaccgcatggtatggtgtgaaaaactccggtggtgtgagatggacccgcgtctgattagctagttggtgaggtaacggcccaccaaggcgacgatcagtagccggcctgagagggtgtacggccacattgggactgagacacggcccaaactcctacgggaggcagcagtggggaatattgcacaatgggggaaaccctgatgcagcgacgccgcgtgagtgatgaagtatttcggtatgtaaagctctatcagcagggaagataatgacggtacctgac

SEQ ID NO: 8111 - DNA, 490 bp, unidentified
  misc_feature 1..490: note = Ascusbbf_259579, encodes 16S rRNA
  source 1..490: mol_type = genomic DNA
agagtttgatcatggctcagaacgaacgctggcggcgcgtcttaaccatgcaagtcgagcgggaatatggggcttgccctatatgagagcggcggactggtgagtaacacgtgggtgatgtacctttcggacggggacagcccgcagaaatgcggggtaataccggatacgatccgtagtgtaaaggctatggaagaaaggagcttcggctccgccgaaagatcggcctgcgacccatcagctagacggcggggtaacggcccaccgtggcaacaacgggtatccggcctgagagggcggacggacacattgggactgagatacggcccagactcctacgggaggcagcaggtaagaatattccgcaatgggggaaaccctgacggagcgacgccgcgtgtgcgaagaaggccggaaggttgtaaagcactttggtggtcgaagaataaagtgggtagggaatgacctacagatgacggtagaccaagaa

SEQ ID NO: 8112 - DNA, 490 bp, unidentified
  misc_feature 1..490: note = Ascusbbf_85872, encodes 16S rRNA
  source 1..490: mol_type = genomic DNA
agagtttgatcatggctcagattgaacgctggcggcaggcttaacacatgcaagtcgagcggtaacaggggtagcttgctacccgctgacgagcggcggacgggtgagtaatgcttaggaatctgcccagtagtgggggacaacagtcggaaacggctgctaataccgcatacgccctacgggggaaagcaggggatcttcggaccttgcgctattggatgagcctaagtcggattagctagttggtggggtaaaggcctaccaaggcgacgatccgtagctggtctgagaggatgatcagccacatcgggactgagacacggcccgaactcctacgggaggcagcagtggggaatattggacaatgggggaaaccctgatccagccatgccgcgtgtgtgaagaaggctttcgggttgtaaagcactttcagcgaggaggaaggccttaaagctaatacctttaaggattgacgttactcgcagaagaa

SEQ ID NO: 8113 - DNA, 490 bp, unidentified
  misc_feature 1..490: note = Ascusbbf_115645, encodes 16S rRNA
  source 1..490: mol_type = genomic DNA
agagtttgatcatggctcaggataaacgctggcggcgtgcttaacacatgcaagtcgaacggagtggttctcccgaggatcgataaagcttgcttttgaaagactcatttgaatcacttagtggcggacgggtgagtaacgcgtgggtaacctgcctcacactgggggatagcagttggaaacgactgataataccgcataagcgcacagcttcgcatgaagcagtgtgaaaaactccggtggtgtgagatggacccgcgtctgattagctagttggtgaggtaacggcccaccaaggcgacgatcagtagccggcctgagagggtgtacggccacattgggactgagacacggcccaaactcctacgggaggcagcagtggggaatattggacaatgggggcaaccctgatccagcgacgccgcgtgaacgaagaagtatctcggtatgtaaagttctatcagcagggaagataatgacggtacctgac

SEQ ID NO: 8114 - DNA, 490 bp, unidentified
  misc_feature 1..490: note = Ascusbbf_160669, encodes 16S rRNA
  source 1..490: mol_type = genomic DNA
agagtttgatcatggctcagattgaacgctagcgggatgctttacacatgcaagtcgaacggcagcgcgagagagcttgctctcttggcggcgagtggcggacgggtgagtaatatatcggaacgtgcccagtagcgggggataactactcgaaagagtggctaataccgcatacgccctacgggggaaagggggggatcgcaagacctctcactattggagcggccgatatcggattagctagttggtggggtaaaggctcaccaaggcaacgatccgtagctggtttgagaggacgaccagccacactgggactgagacacggcccagactcctacgggaggcagcagtggggaattttggacaatgggggaaaccctgatccagccatcccgcgtgtatgatgaaggccttcgggttgtaaagtacttttggcagagaagaaaaggtacctcctaatacgaggtactgctgacggtatctgcagaat

SEQ ID NO: 8115 - DNA, 490 bp, unidentified
  misc_feature 1..490: note = Ascusbbf_715479, encodes 16S rRNA
  source 1..490: mol_type = genomic DNA
agagtttgatcatggctcaggatgaacgctggcggcgtgcttaacacatgcaagtcgaacgaagcttgatgaatgattccttcgggatgaattctgatatgacttagtggcggacgggtgagtaacgcgtgaggaacctgcctttcagagggggacaacatttggaaacgaatgctaataccgcataacactttcttatggcatcttagggaagtcaaagatttatcgctgaaagatggcctcgcgtccaattagttagttggcggggtaacggcccaccaagacgacgattggtagccggactgagaggttgaacggccacattgggactgagacacggcccagactcctacgggaggcagcagtggggaatattgcacaatgggcgcaagcctgatgcagcaacgccgcgtgggggaagacggttttcggattgtaaacccctgttcttagtgacgaagaagtgacggtagctaaggagcaagccacg

SEQ ID NO: 8116 - DNA, 490 bp, unidentified
  misc_feature 1..490: note = Ascusbbf_1587830, encodes 16S rRNA
  source 1..490: mol_type = genomic DNA
agagtttgatcctggctcaggatgaacgctagctacaggcttaacacatgcaagtcgagcggtaacgcgggggcaaccctggcgacgagcggcgaacgggtgagtaatgcttcggaatctccctagtggtggggaataacttggggaaactcaagctaataccgcatacgacctacgggtgaaagcaggggatcgcaagaccttgcgccattggatgagccgaagtcggattagctagttggtggggtaatggcctaccaaggcgacgatccgtagctggtctgagaggacgaccagccacactgggactgagacacggcccagactcctacgggaggcagcagtggggaatattggacaatgggggaaaccctgatccagcgacgccgcgtgtgtgaagaaggcctgcgggttgtaaagcacttttagtggggatgaaaagccaagggctaataccctttggtcttgacctaacccaaagaaaaagcac

SEQ ID NO: 8117 - DNA, 490 bp, unidentified
  misc_feature 1..490: note = Ascusbbf_257972, encodes 16S rRNA
  source 1..490: mol_type = genomic DNA
agagtttgatcatggctcaggataaacgctggcggcgtgcataacacattcaagtcgaacgaagctcctaagcttgcttgcaagcgagggaagacttagtggcggacgggtgagtaacgcgtgagcaatctgcctcggggtgcgggataacgtttggaaacgaacgctaataccgcataacgcatgagagtcgcatggttttcatgccaaagatttattgccctgagatgagctcgcgtccgattagacagttggcggggtaacggcccaccaaatctacgatcggtagccggactgagaggttgaacggccacattggaactgagatacggtccagactcctacgggaggcagcagtggggaatattgggcaatggacgaaagtctgacccagcgacgccgcgtgagggaagaaggtcttcggattgtaaacctctttcagcagggaagaaggaagtgacggtacctgcagaagaagccacggctaact

SEQ ID NO: 8118 - DNA, 490 bp, unidentified
  misc_feature 1..490: note = Ascusbbf_100665, encodes 16S rRNA
  source 1..490: mol_type = genomic DNA
agagtttgatcctggctcaggatgaacgctggcggcgtgcttcatacatgcaagtcgaacgtgaagctgacttcggtcagtggaaagtggcggacgggtgagtaatacataggaaatctgcccttagctgggggacaacagttggaaacgactgctaataccgcatatgagcttagttgaaatactaatcttgaaaactccggtggctaaggatgagcctgtgcctgattagctagttggtggtgtaatggactaccaaggcgacgatcagtagctggtttgagaggatgatcagccacaatgggactgagacacggcccatactcctacgggaggcagcagtagggaattttgcgcaatgggcgaaagcctgacgcagcaacgccgcgtgtgtgatgaagcccctaggggtgtaaaacactgtcagtagggacgaattttgacggtacctacagaggaagcaccggctaactccgtgccagcagccgcg

SEQ ID NO: 8119 - DNA, 490 bp, unidentified
  misc_feature 1..490: note = Ascusbbf_1502255, encodes 16S rRNA
  source 1..490: mol_type = genomic DNA
agagtttgatcctggctcaggatgaacgctggcggcgtgcctaacacatgcaagtcgagcgggaatcgatggacagaggcttcggccgaagaaagtcgaggagagcggcggacgggtgagtaacgcgtaggtaacctaccttatgcacagggatagccccgggaaactggaattaatacctgataacgcgatggagtcacatggttctatcgccaaagatttatcggcatgagatggacctgcgtctgattagctggttggtgaggtaacggcccaccaaggcgacgatcagtagccgacctgagagggtaatcggccacattggaactgagacacggtccaaactcctacgggaggcagcagtggggaatattacacaatgggcgcaagcctgatgtagcaacgccgcgtgagcgaagaaggtcttcggatcgtaaagctctgtccttggggacgaaggaagtgacggtacccaaggaggaagccccgg

SEQ ID NO: 8120 - DNA, 490 bp, unidentified
  misc_feature 1..490: note = Ascusbbf_977079, encodes 16S rRNA
  source 1..490: mol_type = genomic DNA
agagtttgatcatggctcagattgaacgctggcggcaggcctaatacatgcaagtcgaacgataaggttccttcgggaatacataagtggcggacgggtgagtaatatgtagagaatctgccctagagagggggacaacagagggaaacttctgctaataccccatatgcgcgtagttgcgatactattcgtgaaagatttatcgctctaggatgagtctgcatctgattagctagttgggggtgtaatggaccaccaaggcgacgatcagtagctggtttgagaggatgatcagccacaatgggactgagacacggcccatactcctacgggaggcagcagtagggaattttgcgcaatgggcgaaagcctgacgcagcaacgccgcgtgatcgcagacggccttcgggttgtaaagatctgtcagtagggacgaagaatgactgtacttacagaggaagcaccggctaactccgtgccagcagccgcg

SEQ ID NO: 8121 - DNA, 490 bp, unidentified
  misc_feature 1..490: note = Ascusbbf_958170, encodes 16S rRNA
  source 1..490: mol_type = genomic DNA
agagtttgatcctggctcagaatcaacgctggcggcgtgcctcagacatgcaagtcgaacgattaaagctcccttcggggagtgtataaagtggcgcacgggtgagtaacacgtaagtaatctaccttcgagtggggaataacgtccggaaacgggcgctaataccgcataatgcagcggcatcgcaaggtgacagttgttaaagtagcaattcgcttgaagaggagcttgcggcagattagctagttggtagggtaacggcctaccaaggctacgatctgtatccggcctgagagggcggtcggacacactgacactgaataacgggtcagactcctacgggaggcagcagtcgggaattttgggcaatgggggaaaccctgacccagcaacgccgcgtgaaggatgaagtatttcggtatgtaaacttcgaaagaataggaagaataaatgacggtactatttataaggtccggctaactacgtgcca

SEQ ID NO: 8122 - DNA, 490 bp, unidentified
  misc_feature 1..490: note = Ascusbbf_1880805, encodes 16S rRNA
  source 1..490: mol_type = genomic DNA
agagtttgatcctggctcagaatgaacgctggcggcatggattaggcatgcaagtcgaacggcagggcagcgatgcccgagagtggcgaaagggtgagcaacgcgtgaggaacctgcccccgggaccggaacaagcctgtgaaaacgggtctgagaccggatgacgccccgcaccgcatggcgcggaggcgaaacattacatggcccggggagggcctcgcgtcccattagcttgttggcggggtgacggcccaccaaggcgacgacgggtaggtggtctgagaggatggtcacccacactgggactgagacactgcccagactcctacgggaggctgcagtcgagaatcttccgcaatgggcgcaagcctgacggagcgatgccgcgtgagggaagaaggccttcgggtcgtaaacctctgtcggacgggacgaaaccaaatgacggtaccgtccaaggaagccacggctaactacgtgccagcagccg

SEQ ID NO: 8123 - DNA, 490 bp, unidentified
  misc_feature 1..490: note = Ascusbbf_1623748, encodes 16S rRNA
  source 1..490: mol_type = genomic DNA
agagtttgatcctggctcaggatgaacgctagcggcaggcctaatacatgcaagtcggacgggatccgtcttcgagcttgctcggagatggtgagagtggcgcacgggtgcgtaacgcgtgagcaacctgcccctgtcaggggtatagcctctcgaaagagagattaagaccgcatatgataccgttccggcatcggatcggtatgaaatatttataggacagggatgggctcgcgtgacattagctggttggtggggtaacggcccaccaaggcgatgatgtctaggggctctgagaggagaatcccccacactggtactgagacacggaccagactcctacgggaggcagcagtaaggaatattggtcaatgggcggaagcctgaaccagccatgccgcgtgcaggacgaaggccctacgggtcgtaaactgcttttgtacgggaacaaccgcagttacgtgtaactgtctgagtgtaccgtaagaat

SEQ ID NO: 8124 - DNA, 488 bp, unidentified
  misc_feature 1..488: note = Ascusbbf_67205, encodes 16S rRNA
  source 1..488: mol_type = genomic DNA
agagtttgatcctggctcagaacgaacgctggcggcaggcttaacacatgcaagttgaacgggattttatagtagcttgctattatagatgagagtagcgcactggtgagtaacacgtgggaacataccttttggtgggggacaacagttggaaacgactgctaataccgcataagcccggaaggggaaagattaattgccgaaagattggcccgcggaagattaggtagttggtggggtaaaggcctaccaagccgacgatctatagctggtctgagaggacgaacagccacattggaactgagacacggtccagactcctacgggaggcagcagtgaggaatattgggcaatggaggcaactctgacccagccatgccgcgtgagtgaagaaggttttcgaattgtaaagctctttcgggtgtgacgatgatgacggtaacacctaaagaagccccggcaaacttcgtgccagcagccgcggtaat

SEQ ID NO: 8125 - DNA, 490 bp, unidentified
  misc_feature 1..490: note = Ascusbbf_8184, encodes 16S rRNA
  source 1..490: mol_type = genomic DNA
agagtttgatcatggctcaggattaacgctggcggcatgcctaatacatgcaagtcaaacgggaagcttcggcttctagtggcgaacgggtgagtaacacgtaggcaatctgtcctaaagattgggataacagctggaaacggctgataataccggataatagaagatatcgcatgataactttttgaaagacgcaattgtgtcactttaggaggagcctgcggcgcattagatagttggtgaggtaacggcccaccaagtcgatgatgcgtagctgcgctgagaggcgaaacagccacattgggactgagaacggcccaaactcctacgggaggcagcagtagggaattttcggcaatgggggaaaccctgaccgagcaatgccgcgtgaatgatgacgatcttcggattgtaaagttctgttgtagaggacgaatggtaggtagagtggaatgctatctatttgacggtactttactagaaagccccg

SEQ ID NO: 8126 - DNA, 490 bp, unidentified
  misc_feature 1..490: note = Ascusbbf_69628, encodes 16S rRNA
  source 1..490: mol_type = genomic DNA
agagtttgatcctggctcaggacgaacgctggcggcgtgcttaacacatgcaagtcgaacgagggtgcaggagagcttgctcgaatgcaaccgagtggcggacgggtgagtaacgcgtgaataatctgtctcacacagggggataacgcatcgaaagatgtgctaataccgcgtaggaccacgatggggcatcccattgaggtgaaaggagcaatccagtgtgaggtgagttcgcgtctgattagatagttggtgaggtaacggcccaccaagtcaacgatcagtagccgacctgagagggtgatcggccacattgggactgagacacggcccagactcctacgggaggcagcagtggggaatattgggcaatgggcgaaagcctgacccagcaacgccgcgtgaaggaagaaggttttcggattgtaaacttctgtcctatgtgaagagagaaagacggtagcataggaggaagccccggctaactacg

SEQ ID NO: 8127 - DNA, 490 bp, unidentified
  misc_feature 1..490: note = Ascusbbf_119452, encodes 16S rRNA
  source 1..490: mol_type = genomic DNA
agagtttgatcatggctcagaacgaacgctggcggcgcgtcttaagcatgcaagtcgaacggcaaggcgggtgcttgcacctgccccagagtggcggactggtgagtaacacgtgggtgacataccccccggacggggatagccggtagaaataccgggtaataccggatacggtcgcgcaggttagagctgcgcgaggaaaggagctgcggctccgccgggggaatggcccgcggcctattagttagttggtggggtaaaggcctaccaaggcgatgacgggtatccggcctgagagggtgagcggacacattgggactgagatacggcccagactcctacgggaggcagcagctaagaatattccgcaatggacggaagtctgacggagcgacgccgcgtgaacgaagaaggccggaaggttgtaaagttcttttggacgtgaggaataagggtctcagggaatgggggcccggtgactgtagcgtct

SEQ ID NO: 8128 - DNA, 490 bp, unidentified
  misc_feature 1..490: note = Ascusbbf_74439, encodes 16S rRNA
  source 1..490: mol_type = genomic DNA
agagtttgatcctggctcaggattaacgctggcggcgtgcctaatacatgcaagtcgaatggtaagcttgcttaccatggcgaacgggtgagtaacacgtagataacctatctcaaagacgaggataaccattggaaacgatggataatactggataggacgttataagtcgcatgactaaacgtttaaaggggcaacccactatgagaggggactgcggcgcattagctagttggtgaggtaaaggcccaccaaggcgatgatgcgtagccggactgagaggttgaacggccacaatgggactgagaacggcccatactcctacgggaggcagcagtagggaattttcggcaatggacgaaagtctgaccgagcaacgccgcgtgaacgaaggaatatttcggtatgtaaagttcttttattagagaagaaaaaacaaattgacggtatctaatgaataagctccggctaactacgtgccagcagccgc

SEQ ID NO: 8129 - DNA, 490 bp, unidentified
  misc_feature 1..490: note = Ascusbbf_995495, encodes 16S rRNA
  source 1..490: mol_type = genomic DNA
agagtttgatcctggctcaggacgaacgctggcggcatgcctaacacatgcaagtcgaacggagttaagagagcttgctcttttaacttagtggcggacgggtgagtaacgcgtgagcaatctgcctttcagtggggaataatgttctgaaaagagcactaataccgcataatgtacagagaccgcatggtttttgtaccaaagatttatcgctgagagatgagctcgcgtccgattagccagttgatggggtaacggcctaccaaagctacgatcggtagccggactgagaggttgaacggcaacattgagactgagacacggcccagactcctacgggaggcagcagtgggggatattgcgcaatgggggaaaccctgacgcagcaatgccgcgtgatggatgaaggtcttcggattgtaaacttcttttgtcagggacgaaaactgacggtacctgacgaataagctccggctaactacgtgccagc

SEQ ID NO: 8130 - DNA, 490 bp, unidentified
  misc_feature 1..490: note = Ascusbbf_388421, encodes 16S rRNA
  source 1..490: mol_type = genomic DNA
agagtttgatcatggctcaggatgaacgctagcggcaggcttaacgcatgcaagtcgaggggtaacagggagtagcaatactccgctgacgaccggcgcacgggtgcgtaacgcgtatgcaacctacctgtaacaggggtataacggagggaaacttccactaatcccccatattgttgtggattcgcatgtctccacaacgaaagctttctgtggttacggatgggcatgcgtgacattagctagttggtaaggtaacggcttaccaaggcgacgatgtctaggggagttgagaggcttatcccccacactggtactgagacacggaccagactcctacgggaggcagcagtgaggaatattggtcaatggacggaagtctgaaccagccatgccgcgtggaggaagaaggtcctatgggttgtaaactccttttgctccagagtaataaggtccctgcgggggtcgatgagagtatggggcgaataag

SEQ ID NO: 8131 - DNA, 490 bp, unidentified
  misc_feature 1..490: note = Ascusbbf_300787, encodes 16S rRNA
  source 1..490: mol_type = genomic DNA
agagtttgatcatggctcagattgaacgctggcggcaggcctaacacatgcaagtcgagcggtaacaggggaagcttgcttcccgctgacgagcggcggacgggtgagtaatgtatggggatctgcccgatagagggggataactactggaaacggtagctaataccgcataatctctaaggagcaaagcaggggaacttcggtccttgcgctatcggatgaacccatatgggattagctagttggtgaggtaatggctcaccaaggcgacgatccctagctggtctgagaggatgatcagccacactgggactgagacacggcccagactcctacgggaggcagcagtggggaatattgcacaatgggcgcaagcctgatgcagccatgccgcgtgtatgaagaaggccttagggttgtaaagtactttcagttgggaggaaggcgttgatgctaatatcatcaacgattgacgttaccaacagaagaa

SEQ ID NO: 8132 - DNA, 490 bp, unidentified
  misc_feature 1..490: note = Ascusbbf_206438, encodes 16S rRNA
  source 1..490: mol_type = genomic DNA
agagtttgatcatggctcaggacgaacgctggcggcgtgcctaatacatgcaagtcgagcggagttgatggggtgcttgcactcctgatgcttagcggcggacgggtgagtaacacgtaggcaacctgccctcaagactgggataactaccggaaacggtagctaataccggataattaaattcgctgcatggcggagttatgaaaggcggagcaatctgtcacttgaggatgggcctgcggcgcattagctagttggtgaggtaacggctcaccaaggcgacgatgcgtagccgacctgagagggtgaacggccacactgggactgagacacggcccagactcctacgggaggcagcagtagggaatcttccgcaatgggcgaaagcctgacggagcaacgccgcgtgagtgatgaaggttttcggatcgtaaagctctgttgccagggaagaacgtctcatagagtaactgctatgagagtgacggta

SEQ ID NO: 8133 - DNA, 490 bp, unidentified
  misc_feature 1..490: note = Ascusbbf_77388, encodes 16S rRNA
  source 1..490: mol_type = genomic DNA
agagtttgatcatggctcaggataaacgctggcggcgtgcctaatacatgcaagtcgatcgctggagctcaagcttgcttgagtgaaggagaggcgaacgggtgagtaatacataagcaacctgcccacgaagactgggataatctctggaaacggggactaataccggataggtgacaagatcgcatgatcatgtcattaaagattcaaagcactggtggatgggcttatggcgcattagctggttggtgaggtaacggcccaccaaggcgatgatgcgtagccggcctgagagggtgaacggccacattgggactgagacacggcccagactcctacgggaggcagcagtagggaattttcggcaatgggcgcaagcctgaccgagcaacgccgcgtgagtgaagacggccttcgggttgtaaagctctgttgtaagggaagaacacatctgagagaatcaggtgctgacggtaccttaccagaaagc

SEQ ID NO: 8134 - DNA, 490 bp, unidentified
  misc_feature 1..490: note = Ascusbbf_309449, encodes 16S rRNA
  source 1..490: mol_type = genomic DNA
agagtttgatcatggctcaggatgaacgctggcggcatgcctaatacatgcaagtcgaacgaagtgacctctacggaattgtgcttgcacaaggaagaagagattctcacttagtggcgaacgggtgagtaacacgtaggtaacctgcccatctacccgggacaacagttagaaatgactgctaaaaccggataggtaacattgaggcatctcgatgttattaaaggggctacggctctggagatggatggacctgcggtgcattagctagttggtgcggtaacggcgtaccaaggcgacgatgcatagccgacctgagagggcgaccggccacattgggactgagacacggcccaaactcctacgggaggcagcagtagggaattttcggcaatggggggaaccctgaccgagcaatgccgcgtgagcgaagacggtcttcggattgtaaagctctgttgtgagagaaaaaggatgaatatagggaatg

SEQ ID NO: 8135 - DNA, 490 bp, unidentified
  misc_feature 1..490: note = Ascusbbf_732463, encodes 16S rRNA
  source 1..490: mol_type = genomic DNA
agagtttgatcctggctcaggatgaacgctggcggcatgcctaagacatgcaagtcgtacgagatggcccattgaagtttgagtgcttgcacaatttccgatttggattttccatctagtggcggacgggtgagtaacacgtgggtgacctacctttgagtttgggataactactggaaacggtagctaataccgaatgatatgcagattcgtttctgtattaaaaggcgctttatagcgtcgctcttagatgggcctgcggcgtattagctagttggtgaggtaatggctcaccaaggcgacgatgcgtagccggactgagaggttgaacggccacattgggactgagacacggcccaaactcctacgggagacagcagttaggaatattcgtcaatgggggaaaccctgaacgagcaatgccgcgtgagtgatgaaggtcctttggattgtaaaactctgttgtatgggaagaatgaccaaactagga

SEQ ID NO: 8136 - DNA, 490 bp, unidentified
  misc_feature 1..490: note = Ascusbbf_157716, encodes 16S rRNA
  source 1..490: mol_type = genomic DNA
agagtttgatcatggctcaggatgaacgctggcggcgtgcctaacacatgcaagtcgaacggttaaaccggcttcggccggacataaagtggcgaacgggtgagtaacacgtgaccaacctgccccgcgcaccgggacagccccccgaaagggggattgataccggatgctccgccccctccgcatggcgggggcgggaaagcccaggcggcgcgggatggggtcgcggcccatcaggtagacggccgggtagaggccggccgtgccgacgacgggtagccgggttgagagaccgaccggccacattgggactgagatacggcccagactcctacgggaggcagcagtggggaatattgcgcaatgggggcaaccctgacgcagcaacgccgcgtgcgggacgaaggcactcgtgtcgtaaaccgctttcagcagggaagacatcgacggtacctgcagaagaagccccggctaactacgtgccagcagc

SEQ ID NO: 8137 - DNA, 490 bp, unidentified
  misc_feature 1..490: note = Ascusbbf_343010, encodes 16S rRNA
  source 1..490: mol_type = genomic DNA
agagtttgatcatggctcaggatgaacgctggcggcgtgcctaacacatgcaagtcgagcggagataagcaccgagtgaagattcgtctgagctcaccgcttatcttagcggcggatgggtgagtaacacgtggacaacctgcccatgactgggggatagcagctggaaacggctgataataccgcatatgctcacgggaccgcatggtccagggaggaaagatttatcggtcatggatgggtccgcgtcggattaactagttggtgaggtaacggcccaccaaggtgatgatccgtagccggcctgagagggcgaccggccacattgggactgagacacggcccagactcctacgggaggcagcagtgggggatattgcacaatgggcgcaagcctgatgcagcgacgccgcgtgaaggaagaagtactccggtatgtaaacttctatcagcagggaagaagatgacggtacctgactaagaagccccg

SEQ ID NO: 8138 - DNA, 468 bp, unidentified
  misc_feature 1..468: note = Ascusbbf_112865, encodes 16S rRNA
  source 1..468: mol_type = genomic DNA
agagtttgatcatggctcagagcgaacgctggcggcaggcttaacacatgcaagtcgaacgccccgcaaggggagtggcagacgggtgagtaacacgtgggaacgtaccttttggttcggaacaactgagggaaacttcagctaataccggataagcccttacggggaaagatttatcgccaaaagatcggcccgcgtctgattagctagttggtggggtaacggctcaccaaggcgacgatcagtagctggtctgagaggatgatcagccacactgggactgagacacggcccagactcctacgggaggcagcagtggggaatcttggacaatgggggaaaccctgatccagccatgccgcgtgagtgatgaaggccctagggttgtaaagctcttttagcagggaagataatgacggtacctgcagaaaaagccccggctaacttcgtgccagcagccgcggtaat

SEQ ID NO: 8139 - DNA, 490 bp, unidentified
  misc_feature 1..490: note = Ascusbbf_1351163, encodes 16S rRNA
  source 1..490: mol_type = genomic DNA
agagtttgatcatggctcaggatgaacgctagcggcaggcttaacacatgcaagtcgaggggcagcgggtccagcgatggatgccggcgaccggcgcaagggtgcgtaacgcgtgagcgacatgcccgcgaccgggggataaccgatggaaacgtcgcctaatcccccatataccgatgggtcgcatggtccatgggtgaaaactccggtggtcgcggattggctcgcgtgacattaggtagacggcggggtaacggcccaccgtgccgacgatgtctaggggttctgagaggaaggtcccccacaatggaactgagacacggtccatactcctacgggaggcagcagtgaggaatattggtcaatgggcggaagcctgaaccagccatgccgcgtgcgggacgacggccctacgggttgtaaaccgcttttgagagggagcaataaggtcctcgagcaggatcgatgagagtacctttcgaataagcat

SEQ ID NO: 8140 - DNA, 490 bp, unidentified
  misc_feature 1..490: note = Ascusbbf_1680391, encodes 16S rRNA
  source 1..490: mol_type = genomic DNA
agagtttgatcatggctcagaacgaacgctggcggcgcgttttaagcatgcaagtcgagcggcaagggccttcgggcccctagagcggcggacgggtgagtaacacgtggacaatctgccccccggtccgggatagcccagggaaacctggatcaataccggatgcgagcgcggccacataggtggccgcggggaaaggcgcttcggcgccgccgggggatgagtccgcggcccattagctagacggcggggtaaaggcccaccgtggcgacgatgggtagccggcctgagagggtgatcggccacattggaactgagacacggtccagactcctacgggaggcagcagctaagaatcttccgcaatgggcgaaagcctgacggagcgacgccgcgtgaacgatgaaggccgtgaggttgtgaagttcttttcgggagggggaataagggcggcaggcaatggccgcccgatgacgtgaatcccggaata

SEQ ID NO: 8141 - DNA, 490 bp, unidentified
  misc_feature 1..490: note = Ascusbbf_1714637, encodes 16S rRNA
  source 1..490: mol_type = genomic DNA
agagtttgatcatggctcaggatgaacgctgacagaatgcttaacacatgcaagtcaatgagaagactactttcgggtagaggttatcatggcggacgggtgagtaacgcgtaaagaacttgccttttagtctgggataacagttggaaacgactgataagactggatataatttagatgttgcctgacatttaaatgaaattaggagctaaaagagagctttgcgtcctattagctagttggtaaggtaacggcttaccaaggcgatgataggtagctggtctgagaggatgaacagccacaaggggactgagatacggcccttactcttacgggaggcagcagtggggaatattggacaatggtcgcaagactgatccagcaattctgtgtgcacgaagacggttttcggattgtaaagtgctttcagttgggaagaaaagatgacggtaccaacagaagaagcgacggctaaatacgtgccagcagc

SEQ ID NO: 8142 - DNA, 490 bp, unidentified
  misc_feature 1..490: note = Ascusbbf_300084, encodes 16S rRNA
  source 1..490: mol_type = genomic DNA
agagtttgatcctggctcaggatgaacgctggcggcgtgcttaatacatgcaagtcgaacgagagagtttggatagcttgctatctaaatgatctagtggcgaacgggtgagtaatacataggcaatctgccctaaggactgggataacgattagaaatgatcgctaataccggataggtaataagaaggcatctacttattattaaagttgggtttccaacaccataggatgagcttatgctgtattagcttgttggcgggataacagcccaccaaggcgatgatacatagctggtctgagaggatgaacagccacattgggactgagacacggcccagactcctacgggaggcagcagtaaggaattttcggcaatgggcgcaagcctgaccgagcaacgccgcgtgaaggatgaaggtcttcggatcgtaaacatctgttgtaaaggaagaatgttatattgaggaaatgctatataagtgacggta

SEQ ID NO: 8143 - DNA, 488 bp, unidentified
  misc_feature 1..488: note = Ascusbbf_172721, encodes 16S rRNA
  source 1..488: mol_type = genomic DNA
agagtttgatcatggctcagaacgaacgctggtggcaggcctaacacatgcaagtcgaacgggatttatttggagcttgcttcaaataatgagagtggcgcacgggtgagtaacacgtgggaatgtatcatagagtgggggataacagttggaaacgactgctaataccgcatacgccctgaggggtaaagatttatcgctttatgaacagcccgcggaagattaggtagttggtagggtaatggcctaccaagcctacgatctatagctggtctgagaggacgatcagccacactggaactgagacacggtccagactcctacgggaggcagcagtgaggaatattgggcaatgggcgcaagcctgacccagccatgccacgtgagtgatgaaggtcttcggattgtaaagctctttcggatgtgaagatgatgacggtagcatctaaagaagccccggcaaacttcgtgccagcagccgcggtaat

SEQ ID NO: 8144 - DNA, 490 bp, unidentified
  misc_feature 1..490: note = Ascusbbf_1482535, encodes 16S rRNA
  source 1..490: mol_type = genomic DNA
agagtttgatcatggctcagaacgaacgctggtggcgtgttttatacatgcaagtcgagcgaggacggtagcaataccgagccgagcggcgaacgggtgagtaacgcgtaagcaatctgccccacaatcgggaacaaccgtgccaacgcgcggctaatgccggatattgtagtctactgcatagtaggccaacgaaagatttattgttgtgggatgagcttgcgtccgattagctagttggcggggtaatagcccaccaaggcgacgatcgatagccggcctgagagggtgatcggccacattgggactgagatacggcccagactcctacgggaggcagcagtagggaatattgcgcaatggggggaaccctgacgcagcaacgccacgtgtgggaagaagcatttcggtgtgtaaaccactgtcggaaaggaataacggaagacttcggtctttatgaatgtacttttagagggagcaccggcaaact

SEQ ID NO: 8145 - DNA, 490 bp, unidentified
  misc_feature 1..490: note = Ascusbbf_413604, encodes 16S rRNA
  source 1..490: mol_type = genomic DNA
agagtttgatcctggctcaggatgaacgctggcggcgtgcctaacacatgcaagtcgagcgagaaactgcgaattgacgcttcggttgattttcgcagcggaaagcggcggacgggtgagtaacgcgtaggcaacctgccctttacacagggatagcctctggaaacggggattaagacctgataatccggcatcaacacatgttggagccggcaaagatttattggtaaaggatgggcctgcgtctgattagttagttggtgaggtaacggctcaccaaggcgacgatcagtagccgacctgagagggtgatcggccacattggaactgagacacggtccagactcctgcgggaggcagcagtggggaatattgcacaatgggggaaaccctgatgcagcaacgccgcgtgaaggatgaaggcctttgggtcgtaaacttctgtccttggggaagaaagaaatgacggtacccttggaggaagccccgg

SEQ ID NO: 8146 - DNA, 490 bp, unidentified
  misc_feature 1..490: note = Ascusbbf_1493310, encodes 16S rRNA
  source 1..490: mol_type = genomic DNA
agagtttgatcctggctcaggacgaacgctggcggcgcgcctaacacatgcaagtcgaacgggactagtgaccggagattagatgagttctagtttgcgatcactagttcagtggcggacgggtgagtaaagcatgagcaacctggctactagagggggatagcttttggaaacagaagataataccgcataaatcaaagatttcgcatgagatttttggaaaaggagcaatccgctaatagatgggctcatgtccgattagctagttggtggggtaaaggcctaccaaggcgacgatcggtagccgtactgagaggttcaacggccacattgggactgagacacggcccagactcctacgggaggcagcagtgaggaatattgcgcaatggagggaactctggcgcagcgacgccgcgtgagggaagaaggtttttgaattgtaaacctctgtcctcagggaagaaagaaatgacggtacctggggagg

SEQ ID NO: 8147 - DNA, 490 bp, unidentified
  misc_feature 1..490: note = Ascusbbf_1671309, encodes 16S rRNA
  source 1..490: mol_type = genomic DNA
agagtttgatcatggctcaggatgaacgctagctacaggcttaacacatgcaagtcgaggggcagcatggcggatgcttgcatctgccgatggcgaccggcgcacgggtgagtaacgcgtatccaacctgccccccaccgcggtataccccggcgaaagccggcctaatcccgcatgcactccgaggatgacatctgacttggaggaaaggtattttttccggtggcggatggggatgcgtctgattagcttgtcggcggggtaacggcccaccgaggcatcgatcagtaggggttctgagaggaaggtcccccacattggaactgagacacggtccaaactcctacgggaggcagcagtgaggaatattggtcaatgggcgcaagcctgaaccagccaagtagcgtgcaggatgacggccctatgggttgtaaactgctttttcgcgggactaactccggggacttgtccccggcctgcatgtaccgcg

SEQ ID NO: 8148 - DNA, 490 bp, unidentified
  misc_feature 1..490: note = Ascusbbf_435761, encodes 16S rRNA
  source 1..490: mol_type = genomic DNA
agagtttgatcatggcttaggatgaacgctggcggcgtgcttaacacatgcaagtcgaacgaagcaattttcttgcttgcaagaaagttgacttagtggcggacgggtgagtaacgcgtgggtaacctgcctcatacagggggataacagttggaaacgactgctaagaccgcataacccgctagtgtcgcatgacatggacggaaaatatttataggtatgagatgggcccgcgtctgattagctagttggtaaggtaacggcttaccaaggcgacgatcagtagccgacttgagagagtgatcggccacattgggactgagacacggcccaaactcctacaggaggcagcagtggggaatattggacaatgggggaaaccctgatccagcgacgccgcgtgagtgaagaagtatttcggtatgtaaagctctatcagcagggaagataatgacagtacctgattaagaagccccggctaactacgtgc

SEQ ID NO: 8149 - DNA, 470 bp, unidentified
  misc_feature 1..470: note = Ascusbbf_173817, encodes 16S rRNA
  source 1..470: mol_type = genomic DNA
agagtttgatcatggctcagaatgaacgctggcggcaggcctaaaacatgcaagtcgaacgctgtagcaatacagagtggcgcacgggtgagtaacacgtgggaatatgccttttggtacggaacaacttttggaaacgaaagctaataccgtatggtcccttcggggtaaagatttatcgccaaaagattagcccgcgtctgattagctagttggtagggtaaaggcctaccaaggcgacgatcagtagctgttctgagaggaagatcagccacactgggactgagacacggcccagactcctacgggaggcagcagttaggaatattggacaatgggcgcaagcctgatccagccatgccgcgtgaacgatgaaggccttcgggttgtaaagttctttagccgatgattataatgactgtagtcggaaaataagccccggctaacttcgtgccagcagccgcggtaat

SEQ ID NO: 8150 - DNA, 490 bp, unidentified
  misc_feature 1..490: note = Ascusbbf_867828, encodes 16S rRNA
  source 1..490: mol_type = genomic DNA
agagtttgatcatggctcaggacgaacgctggcggcgcgcctaacacatgcaagtcgcgcggttaaagctgcttcggcagtgcataaagcggcgaacgggcgagtaacgcgtgggcaacctgcccccctcccgggaatagccgggggaaaccccgggtaaggcccggcgaccccccggaagggcatccttccgggggcatacggaggggagggggatgggcccgcgtccgattagccagacggcggggtgacggcccaccgtggcgacgatcggtagccgggctgagaggccggacggccgcattgggactgagacacggcccagactcctacgggaggcagcagtggggaatattgcgcaatgggcgaaagcttgacgcagcaacgccgcgtgcgggaaggaggccctcgggccgtaaaccgctttcagcggggacgatcatgactgtacccgcagaagaagccccggctaactacgtgccagcagccg

SEQ ID NO: 8151 - DNA, 490 bp, unidentified
  misc_feature 1..490: note = Ascusbbf_1660502, encodes 16S rRNA
  source 1..490: mol_type = genomic DNA
agagtttgatcctggctcaggatgaacgctagcggcaggcctaacacatgcaagtcgaggggtagaagctttcgggctttgagaccggcgcacgggtgcgtaacgcgtatgcaatctgccttgtactgagggatagcccagagaaatttggattaatacctcatagtattttttgttggcatcaacagattattaaagagattcggtacaagatgagcatgcgtcccattagctagttggtatggtaacggcataccaaggctacgatgggtaggggtcctgagagggagatcccccacactggtactgagacacggaccagactcctacgggaggcagcagtgaggaatattggtcaatggtcgcaagactgaaccagccatgccgcgtgtaggatgaagcatctatggtgtgtaaactacttttgtacgggaagaaacactccctcgtgagggagcttgacggtaccgtaagaataaggatcggctaa

SEQ ID NO: 8152 - DNA, 490 bp, unidentified
  misc_feature 1..490: note = Ascusbbf_1178020, encodes 16S rRNA
  source 1..490: mol_type = genomic DNA
agagtttgatcatggctcaggatgaacgctagcggcaggcctaatacatgcaagtcgaacgggatctatgagtaagcttgcttacttttagtgagagtggcgcacgggtgcgtaacgcgtgagtaacctacccatatcagggggatagccccgagaaatccggattaacaccgcatgacacagcaattcggcatcgaatcactgttaaatatttataggatatggatgggctcgcgtgacattagctagttggtaaggtaacggcttaccaaggctacgatgtctaggggctctgagaggagaatcccccacactggtactgaggaacggaccagactcctacgggaggcagcagtaaggaatattggtcaatggacgcaagtctgaaccagccatgccgcgtgcaggacgactgccctatgggttgtaaactgcttttgtacgggaataaacactggtacgcgtaccagcttgaatgtaccgtaagaat

SEQ ID NO: 8153 - DNA, 490 bp, unidentified
  misc_feature 1..490: note = Ascusbbf_1630380, encodes 16S rRNA
  source 1..490: mol_type = genomic DNA
agagtttgatcatggctcaggatgaacgctagcgataggcctaacacatgcaagtcgaggggcagcacaaggggtagcaatacttctggtggcgaccggcggatgggtgagtaacacgtatgcaacctgcctacaacgaggggataactccgggaaatcggtgctaataccctataatacaggggccccgcatggggatatttgttaaagattaatcggttgtagatgggcacgcgttccattagctagttggtgaggtaacggctcaccaaggcaacgatggataggggaactgagaggtttaccccccacactggtactgagacacggaccagactcctacgggaggcagcagtgaggaatattggtcaatggaggcaactctgaaccagccacgtcgcgtgaaggaagacggccctacgggttgtaaacttcttttgtagggaataaagtgtagtacgtgtactattttgcatgtaccttacgaata

SEQ ID NO: 8154 - DNA, 490 bp, unidentified
  misc_feature 1..490: note = Ascusbbf_33968, encodes 16S rRNA
  source 1..490: mol_type = genomic DNA
agagtttgatcatggctcaggacgaacgctggcggcgtgcttaacacatgcaagtcgaacggaccgagccccttcgggggcgaaggttagtggcgaacgggtgagtaacgcgtgaggaacctgcctttcagagggggacaacagttggaaacgactgctaataccgcataacacatatgcttcgcatgaaggatatgtcaaagattttatcgctgaaagatggcctcgcgtctgattagatagttggtggggtaacggcccaccaagtcgacgatcagtagccggactgagaggttgaacggccacattgggactgagatacggcccagactcctacgggaggcagcagtggggaatattgggcaatgggcgcaagcctgacccagcaacgccgcgtgaaggaagaaggctttcgggttgtaaacttcttttaccagggacgaaggatgtgacggtacctggagaaaaagccacggctaactacgtgcca

SEQ ID NO: 8155 - DNA, 490 bp, unidentified
  misc_feature 1..490: note = Ascusbbf_69800, encodes 16S rRNA
  source 1..490: mol_type = genomic DNA
agagtttgatcatggctcaggatgaacgctagcggcaggcttaacacatgcaagtcgaggggcagcgggggtagcaatacccgccggcgaccggcgaaagggtgcgtaacgcgtgagcaacttgcccgtatccgggacataagcggtggaaacgccgtctaatttcccataacaacagaggctgcatgacctttgtttgaaagatccgtcggatacggatgggctcgcgagacattagctggttggtgaggtaacggcccaccaaggcgacgatgtctaggggttctgagaggaaggtcccccacactggaactgagacacggtccagactcctacgggaggcagcagtgaggaatattggtcaatggacgcaagtctgaaccagccatgccgcgtgaaggattgaggccctatgggtcgtaaacttcttttgtggtggagcaataaggcgtacgtgtacgccgatgagagtacatcacgaataagcatc

SEQ ID NO: 8156 - DNA, 490 bp, unidentified
  misc_feature 1..490: note = Ascusbbf_1285152, encodes 16S rRNA
  source 1..490: mol_type = genomic DNA
agagtttgatcctggctcagagcgaacgctggcggcatgcttaacacatgcaagtcgcacgaaggtttcggccttagtggcggacgggtgagtaacgcgtaggtatctatccatgggtgggggataacactgggaaactggtgctaataccgcatgacacctgagggtcaaaggcgcaagtcgcctgtggaggagcctgcgtttgattagctagttggtggggtaaaggcctaccaaaccgatgatctctagctggtttgagaggacaatcagccacattggaattgagaaacggaccaaactcctacgggaggcagcagtggggagtattgcacaatgggggaaaccctgatgcagccatgccgcgtgtgtgaagaaggccttcgggttgtaaagcacttttgcattcgaggaagacggcgtataaataaatgcgctatttgacgttagagtgtgaataagcaccggcaaactccgtgccagcagccgc

SEQ ID NO: 8157 - DNA, 490 bp, unidentified
  misc_feature 1..490: note = Ascusbbf_325, encodes 16S rRNA
  source 1..490: mol_type = genomic DNA
agagtttgatcctggctcagaacgaacgctggcggcgcgtcttaagcatgcaagtcgagcgggaggggcagcgatgccccgagagcggcggacgggtgagtaacgcgtggacaaccgaccctccggtgggggatagccgagcgaaagcgcggataataccgcatgagacggagcgggggcggccctgttccgggaaagcgcctgcgggcgcgccgggggacgggtctgcgtcccatcagctagacggcggggtgaaggcccaccgtggcgacgacgggtagccggcctgagagggtggacggccacattgggactgggaacggcccagactcctacgggaggcagcagctaaggatcttccgcaatgggcgaaagcctgacggagcgacgccgcgtggacgatggaggccggaaggttgtgaagtccttttctcgggggggaacaaccgtgccagggaatgggcgcggggtgacgcggaccgaggaataa

SEQ ID NO: 8158 - DNA, 490 bp, unidentified
  misc_feature 1..490: note = Ascusbbf_31934, encodes 16S rRNA
  source 1..490: mol_type = genomic DNA
agagtttgatcatggctcaggacgaacgctggcggcgtgcctaacacatgcaagtcgaacgaagcactggaaatgattccttcgggttgattttcctttgactgagtggcggacgggtgagtaacacgtgagcaacctgcctttcagagcgggatagcagttggaaacgactgataataccgcatgacatgtctcttccgcatgagagagacatcaaatgatttttcgctgaaagatgggctcgcgtccgattaggtagttggtgaggcaacggctcaccaagccgacgatcggtagccggactgagaggtcgatcggccacatgaggactgagacacggcccagactcctacgggaggcagcagtgggggatattgcacaatgggcgcaagcctgatgcagcaacgccgcgtgagggaggacggtcttcggattgtaaacctctgtccttggggaagaaacaaatgacggtacccttggaggaagccac

SEQ ID NO: 8159 - DNA, 490 bp, unidentified
  misc_feature 1..490: note = Ascusbbf_4804, encodes 16S rRNA
  source 1..490: mol_type = genomic DNA
agagtttgatcctggctcaggataaacgctggcggcatgcctaatacatgcaagtcgaacggtctagcttgctagacagtggcgaacgggtgagtaacacgtaggtaatccatcccaaggacgaggatagcttctggaaacggaaggtaaaactggatagtatagaatagggcatcctaatctatttaaaagagcaatctaccctgggaagagcctgcggcgcattagctagttggtgaggtaatggcccaccaaggcgatgatgcgtagccggactgagaggtcgaccggccacattgggactgagacacggcccagactcctacgggaggcagcagtagggaattttcggcaatgggcggaagcctgaccgagcaatgccgcgtgaatgatgaagtatttcggtatgtaaagttcttttattagggacgaaaaaacaaattgacggtacctaatgaataagctccggctaactacgtgccagcagccg

SEQ ID NO: 8160 - DNA, 490 bp, unidentified
  misc_feature 1..490: note = Ascusbbf_122423, encodes 16S rRNA
  source 1..490: mol_type = genomic DNA
agagtttgatcatggctcaggacgaacgctggcggtatgcttaacacatgcaagtcgaacgagaagctttttattgatccttcgggtgatttagaaagcagacagtggcgaacgggtgagtaacgcgtgggcaacctgcctttcggagcggaatagcctcgggaaaccgggagtaaagccgcataacattgttttttcgcatgaagaaacaatcaaaactccggtgccgaaagatgggcccgcgtcctattagctggttggtgaggcaacggctcaccaaggcgacgataggtagccggtctgagagggcgaacggccacactggaactgagacacggtccagactcctacgggaggcagcagtggggaatattgcgcaatgggggcaaccctgacgcagcaataccgcgtgagtgatgaaggttttcggatcgtaaaactctgttattggggaagaagaagtgacggtacccaatgaggaagtcccggc

SEQ ID NO: 8161 - DNA, 490 bp, unidentified
  misc_feature 1..490: note = Ascusbbf_457392, encodes 16S rRNA
  source 1..490: mol_type = genomic DNA
agagtttgatcatggctcaggacgaacgctggcggcgtgcttaacacatgcaagtcgaacggtaaggccctttcgggggtacacgagtggcgaacgggtgagtaacacgtgggtaatctgccctgcacttcgggataagcctgggaaactgggtctaataccggatattcagctttcatcgcatggtgtttgttggaaagtttttcggtgcaggatgagtccgcggcctatctgcttgtcggtggggtaatggcctaccaaggcgacgacgggtagccggcctgagagggtgatcggccacactggggctgagacacggcccagactcctacgggaggcagcagtggggaatattgcacaatgggcgaaagcctgatgcagcgacgccgcgtgggggatgacggtcttcggactgtaaacccctttcagtagggacgaagcgcaagtgacggtacctgcagaagaagcaccggccaactacgtgccagca

SEQ ID NO: 8162 - DNA, 490 bp, unidentified
  misc_feature 1..490: note = Ascusbbf_79293, encodes 16S rRNA
  source 1..490: mol_type = genomic DNA
agagtttgatcatggctcaggatgaacgctggcggcgtgcttaacacatgcaagtcgaacgaagcatcccgcccgagaaaatggagtgcttgcacaaagtggactcaattgggatgactgagtggcggacgggtgagtaacgcgtgggtaacctgccctatacagggggatagcagttggaaacgactgataataccgcataagcgcacggtatcgcatgatacagtgtgaaaaactccggtggtataggatggacccgcgtctgattagctagttggtgaggtaacggctcaccaaggcgacgatcagtagccgacctgagagggtgaccggccacattgggactgagacacggcccaaactcctacgggaggcagcagtggggaatattgcacaatgggcgaaagcctgatgcagcgacgccgcgtgagtgacgaagtatttcggtatgtaaagctctatcagcagggaagataatgacggtacctga

SEQ ID NO: 8163 - DNA, 490 bp, unidentified
  misc_feature 1..490: note = Ascusbbf_27036, encodes 16S rRNA
  source 1..490: mol_type = genomic DNA
agagtttgatcctggctcaggatgaacgctagctacaggcttaacacatgcaagtcgaggggcagcgagaagaaagcttgctttctttgtcggcgaccggcgcacgggtgcgtaacgcgtatccaatctaccctattctcagggatagccttgcgaaagtaagattaatacctgatggtctcacgctaccgcatgagggtgtgagtaaagattcatcggaatgggatgaggatgcgtccgattagcttgacggcggggtaacggcccaccgtggctacgatcggtaggggttctgagaggaaggtcccccacactggaactgagacacggtccagactcctacgggaggcagcagtgaggaatattggtcaatggtcgggagactgaaccagccaagtagcgtgagggaagactgccctatgggttgtaaacctcttttgtttgggaataaagtgccgtacgtgtacggttttgtatgtaccttacgaat

SEQ ID NO: 8164 - DNA, 490 bp, unidentified
  misc_feature 1..490: note = Ascusbbf_52695, encodes 16S rRNA
  source 1..490: mol_type = genomic DNA
agagtttgatcatggctcaggacgaacgctggcggcgtgcctaacacatgcaagtcgaacggagctgagaagcttgcttttcagcttagtggcggacgggtgagtaacgcgtgagtaacctgcctccgagagtggaataacgttttgaaaagaacgctaataccgcataacgtatcagtatcgcatggtattgataccaaagattatatcgctcggagatggactcgcgtccgattagttagttggtgaggtaacggctcaccaagaccgcgatcggtagccggactgagaggttgatcggccacattgggactgagacacggcccagactcctacgggaggcagcagtgggggatattgcgcaatggggggaaccctgacgcagcaacgccgcgtgaaggatgaaggttttcggattgtaaacttcttttatcagggacgaaaaacgacggtacctgatgaataagctccggctaactacgtgccagca

SEQ ID NO: 8165 - DNA, 490 bp, unidentified
  misc_feature 1..490: note = Ascusbbf_53009, encodes 16S rRNA
  source 1..490: mol_type = genomic DNA
agagtttgatcatggctcaggatgaacgctagcggcaggcctaatacatgcaagtcgtacgggatctccccttcgggggagtgagagtggcgcacgggtgcgtaacgcgtatgcaaccaaccctcatccgggggacagccggtggaaacgccgggtaataccccataccgattcctgtgggcatccacggggattgaaagacttaggtcggaggaggacgggcatgcgtcccattagctagtcggcggggtgacggcccaccgaggcgacgatgggtaggggatctgagaggacggtcccccacactggtactgagacacggaccagactcctacgggaggcagcagtaaggaatattgggcaatggggggaaccctgacccagccatgccgcgtgagggaagtaggccctacgggtcgtgaacctcttttgtccagggacaaggacggcgtcgtgaacgtcgtttgagggtactggaagaataagcatc

SEQ ID NO: 8166 - DNA, 490 bp, unidentified
  misc_feature 1..490: note = Ascusbbf_223712, encodes 16S rRNA
  source 1..490: mol_type = genomic DNA
agagtttgatcctggctcagaacgaacgctggcggcaggcctaacacatgcaagtcgagcgtgaaaggggcttcggccctgagtaaagcggcgcacgggtgagtaacacgtgaataatctgcccctccgaccgggataacagaccgaaaggactgctaataccggataagcccacaagccaaccgggcgtgcgggaaaagtacgggatccttcgggaccgtatgcggaaggatgagttcgcgttccattagatagttggtgaggtaatggcccaccaagtcgacgatggatagctggtctgagaggatgatcagccacactggaactgagacacggtccagactcctacgggaggcagcagtggggaatcttgcgcaatgggggaaaccctgacgcagccatgccgcgtgagtgatgaaggccttcgggttgtaaagctctgtctaaggggacgaatggcacatagaacaagacattatgtgcgtgacgg

SEQ ID NO: 8167 - DNA, 490 bp, unidentified
  misc_feature 1..490: note = Ascusbbf_62890, encodes 16S rRNA
  source 1..490: mol_type = genomic DNA
agagtttgatcctggctcaggacgaacgctggcggcgtgcttaacacatgcaagtcgaacgatgatgaccggagcttgctttggttggattagtggcgaacgggtgagtaacacgtgagtaacctgcccccttcttcgggataaccattggaaacggtggctaataccgggtatgacatcggatcgcatggtttggtgtggaaaggttttttctggtgggggatgggctcgcggcctatcagcttgttggtggggtgatggcctaccaaggctttgacgggtagccggcctgagagggcgaccggccacactgggactgagacacggcccagactcctacgggaggcagcagtggggaatattgcacaatgggggaaaccctgatgcagcgacgccgcgtgggggatgaaggccttcgggttgtaaacccctttcagtaaggaacaaggccatgattgttgttgtggttgagggtacttgcagaagaagc

SEQ ID NO: 8168 - DNA, 490 bp, unidentified
  misc_feature 1..490: note = Ascusbbf_725657, encodes 16S rRNA
  source 1..490: mol_type = genomic DNA
agagtttgatcatggctcagattgaacgctggcggcaggcttaacacatgcaagttgagcgggattggttgatagcttgctattgaccatgagagcagcgcactggtgagtaacacgtgggaacgtaccttttggtgggggacaacatctggaaacggatgctaataccgcataagccctacgggggaaaggagcgatttgccgaaagatcggcccgcggaagattaggtagtaggtggggcaacggcctacctagccgacgatctatagctggtctgagaggacgatcagccacattggaactgagacacggtccagactcctacgggaggcagcagtgaggaatattgggcaatggagggaactctgacccagccatgccgcgtgagtgaagaaggttttcggattgtaaagctctttcagatgggaagatgatgacggtaccatcagaagaagcaccggctaacttcgtgccagcagccgcggtaat

SEQ ID NO: 8169 - DNA, 490 bp, unidentified
  misc_feature 1..490: note = Ascusbbf_59003, encodes 16S rRNA
  source 1..490: mol_type = genomic DNA
agagtttgatcatggctcaggatgaacgctagcggcaggcctaatacatgcaagtcgtacgggatctccccttcgggggagtgagagtggcgcacgggtgcgtaacgcgtatgcaaccaaccctcatccgggggacagccggtggaaacgccgggtaataccccatgtccactttgggaggcatcttctgaggtggaaaggctttggtcggaggaggacgggcatgcgtcccattagctagtcggcggggtgacggcccaccgaggcgacgatgggtaggggatctgagaggacggtcccccacactggtactgagacacggaccagactcctacgggaggcagcagtaaggaatattgggcaatgggggtaaccctgacccagccatgccgcgtgagggaagtaggccctacgggtcgtgaacctcttttgtccagggacaaggacggcgtcgggaacgtcgtttgagggtactggaagaataagcatc

SEQ ID NO: 8170 - DNA, 487 bp, unidentified
  misc_feature 1..487: note = Ascusbbf_1514345, encodes 16S rRNA
  source 1..487: mol_type = genomic DNA
agagtttgatcctggctcagaacgaacgctggcggcatggattaggcatgcaagtcgaacgaggtagcaataccgagtggcggaagggtgaggaacacgtgagtaacctgcccccaagttgggaataacagttggaaacgactgctaataccgaatgtggctgttgtattgcatgatgtaacagttaaagatttatcgcttggggatgagctcgcgtcccattagttagttggtgaggtaacggcccaccaagacaatgatgggtagctggtctgagaggatggtcagccacactgggactgagacactgcccagactcctacgggaggctgcagtcgagaatcttgggcaatgcgcgaaagcgtgacccagcaatgccgcgtgtatgatgaagggcttcggattgtaaaatactgtctcccgggacgaaagatgacggtaccggggaaggaagccacggctaactacgtgccagcagccgcgtaat

SEQ ID NO: 8171 - DNA, 490 bp, unidentified
  misc_feature 1..490: note = Ascusbbf_43853, encodes 16S rRNA
  source 1..490: mol_type = genomic DNA
agagtttgatcatggctcagaacgaacgctggcggcgcgttttaagcatgcaagtcgagcgggaaccgggggcaactctggggagagcggcggacgggtgagtaacacgtggataatctgtcctttagactgggatagcctgatgaaagtcaggataataccggataagacgtgtgccacacaagtggtatacgggaaaggagctaaggcttcgcttgagggtgagtccgcggcccattagctagatggtggggtaaaggcctaccatggcgatgatgggtagccggcctaagagggtgaacggccacattgggactgagatacggcccagactcctacgggaggcagcagctaagaatattccgcaatggagggaactctgacggagcgacgccgcgtgaatgatgaaggccgtgaggttgtaaagttcttttctggagggagaataaggcttgtagggaatgacaggctgatgacgtgaatccaggaa

SEQ ID NO: 8172 - DNA, 490 bp, unidentified
  misc_feature 1..490: note = Ascusbbf_65408, encodes 16S rRNA
  source 1..490: mol_type = genomic DNA
agagtttgatcatggctcaggacgaacgctggcggcgtgcctaatacatgcaagtagaacgctgagcactttagcttgctagggtgtgatgagttgcgaacgggtgagtaacgcgtaggtaacctacctcatagcgggggataactattggaaacgatagctaataccgcataacaatagctgccgcatggcagctatttgaaaggaacaatcgtttcactatgagatggacctgcgttgtattagctagttggtggggtaaaggcctaccaaggcgacgatacatagccgacctgagagggtgatcggccacactgggactgagacacggcccagactcctacgggaggcagcagtagggaatcttcggcaatggggggaaccctgaccgagcaacgccgcgtgagtgaagaaggttttcggatcgtaaagctctgttgtaagagaagaacgggtgagagagtggaaagttctcacagtgacggtatct

SEQ ID NO: 8173 - DNA, 490 bp, unidentified
  misc_feature 1..490: note = Ascusbbf_81668, encodes 16S rRNA
  source 1..490: mol_type = genomic DNA
agagtttgatcatggctcagaacgaacgctggcggcgcgtcttaagcatgcaagtcgaacggcaagttaccttcgggtaacctagagtggcggactggtgagtaacacgtaggtgacgtaccccccggacggggatagctcctagaaataggagataataccggataaggttgcacgggctggaaccgtgtaaggaaaggtgcttcggcaccgccgggggagcggcctgcggcccatcagctggtaggtgaggtaaaggcccacctaggcaatgacgggtatccggcctgagagggtgagcggacacattgggactgagatacggcccagactcctacgggaggcagcagctaagaatattccgcaatgcacgaaagtgtgacggagcgacgccgcgtggacgatgaaggccggaaggttgtaaagtccttttataactgaggaataagccgtgcagggaatggcatggtggtgactgtaggttatgaat

SEQ ID NO: 8174 - DNA, 490 bp, unidentified
  misc_feature 1..490: note = Ascusbbf_410959, encodes 16S rRNA
  source 1..490: mol_type = genomic DNA
agagtttgatcatggctcagaacgaacgctggcggcgtgcctaacacatgcaagtcgagcgcgaaaggtgacttcggttgccgagtagagcggcgcacgggtgaggaacacgtgagtaatgtgcccttgaatctggaataacatttcgaaaggagtgctaatgccggataagaccacgacagctgcggctgaagtgggaaaaggctgggatctccgcgaggggaccagttgtttgaggagcagctcgcggcccatcagctagttggcggggtaagagcccaccaaggcgacgacgggtagctggtctgagaggacgatcagccacactggaactgagacacggtccagactcctacgggaggcagcagtggggaattttgcgcaatgggcgaaagcctgacgcagcaacgccgcgtgagcgatgaaggccttcgggtcgtaaagctctttcgacaggaaggaaagggttcaggttaatggcctgagcttt

SEQ ID NO: 8175 - DNA, 490 bp, unidentified
  misc_feature 1..490: note = Ascusbbf_36025, encodes 16S rRNA
  source 1..490: mol_type = genomic DNA
agagtttgatcatggctcaggacgaacgctggcggcatgcctaacacatgcaagtcgaacggaggtggaaacaccttagtggcgaacgggtgagtaacacgtgagcaacctgccccatacacagggataacagttagaaatgactgctaataccggataagaccacatctcggcatcgagaaggggtcaaagcgattcagcggtatgggatgggctcgcgtccaattagcttgttggcggggtaacggcccaccaaggcaacgattggtagccgacctgagagggtgatcggccacattggaactgagacacggtccaaactcctacgggaggcagcagtggggaatattgggcaatggaggaaactcttacccagcaatgccgcgtgagtgatgaaggtcttttggattgtaaagctctttgattagggacgaaaaaaatgacggtacctaaagaacaagccccggctaactatgtgccagcagccgcg

SEQ ID NO: 8176 - DNA, 490 bp, unidentified
  misc_feature 1..490: note = Ascusbbf_722794, encodes 16S rRNA
  source 1..490: mol_type = genomic DNA
agagtttgatcatggctcagattgaacgctggcggcaggcctaatacatgcaagtcggacgggagcagcaatgctccagtggcgcaagggtgaggaacacgtgaacaacctgccttcgagttggggatagcttctggaaacgggagataataccgaataacatcaccggatcgcatgatttggtgatcaaagcggcaatgcgcttgaagaggggttcgcgtcccattagctagttggtgaggtaacggcccaccaaggcgatgatgggtagctggtctgagaggacgatcagccacattgggactgagatactgcccagactcctacgggaggctgcagtcgagaattttgggcaatggacgaaagtctgacccagcaatgccgcgtgcgggatgaaggtcttcggattgtaaaccgctgtcaagagggacgaaatttgacggtacctctggaggaagccacggctaactacgtgccagcagccgcggta

SEQ ID NO: 8177 - DNA, 490 bp, unidentified
  misc_feature 1..490: note = Ascusbbf_161507, encodes 16S rRNA
  source 1..490: mol_type = genomic DNA
agagtttgatcctggctcagagcgaacgttagcggcgcgcctaacacatgcaagtcgcacgagaagggggcaaccctggacagtggcgcacgggtgcgtaacacgtagataacctgcccttcgaagggggataacgttccgaaaggagcgctaataccgcatacagccgttcttggtaagccaagggcgggcaaaggctgggaccggcaacggccagtcgtcgaaggaggggtctgcggcccatcagctagttggtgaggtaatggctcaccaaggcaaagacgggtagctggtctgagaggatgatcagccacactggtactggaacacggaccagactcctacgggaggcagcagtggggaatcttggtcaatgggcgcaagcctgaaccagcgacgccgcgtgagtgatgaaggccttcgggttgtaaagctctgtggggagggaagaaagactaaggtcgaataggccttaggttgacggtacctc

SEQ ID NO: 8178 - DNA, 490 bp, unidentified
  misc_feature 1..490: note = Ascusbbf_211654, encodes 16S rRNA
  source 1..490: mol_type = genomic DNA
agagtttgatcatggctcaggatgaacgctagcggcaggcctaatacatgcaagtcgaacgggataggctccttcgggggccttgagagtggcgcacgggtgcgcaacgcgtatgcaaccaacccccgacaggcggatagccggtggaaacgccggataatacgccatggttccgtgggagggcatcctcctgaggataaagccgagaggcggtcggggacgggcatgcgtcccattagatggtaggcggggtgacggcccacctagtccacgatgggtaggggatctgagaggacggtcccccacactggtactgagacacggaccagactcctgcgggaggcagcagtaagggatattggtcaatgggcggaagcctgaaccagccatgccgcgtgagggaatgaggccctacgggtcgtgaacctcttttattcggggacaaggacgcggtcgggaaccgtgtttgagggtaccgaaggaataagcg

SEQ ID NO: 8179 - DNA, 490 bp, unidentified
  misc_feature 1..490: note = Ascusbbf_101402, encodes 16S rRNA
  source 1..490: mol_type = genomic DNA
agagtttgatcatggctcaggatgaacgctggcggcgtgcctaacacatgcaagtcgagcgggaaatcgctgattgagatttcggttgattgaagcgatggatagcggcggacgggtgagtaacgcgtaggtaatctgccttcagcacagggatagcctagggaaacctggattaatacctgataatgcagtttggtcacatggccagattgccaaagatttatcggctggagatgaacctgcgtctgattagatagttggtgaggtaacggcccaccaagtcaacgatcagtagccgacctgagagggtgatcggccacattggaactgagacacggtccaaactcctacgggaggcagcagtggggagtattgcacaatgggcgcaagcctgatgcagcaacgccgcgtgagcgatgaaggtcttcggatcgtaaagctctgtcctctgggaagaagaagtgacggtaccagaggaggaagccccggc

SEQ ID NO: 8180 - DNA, 490 bp, unidentified
  misc_feature 1..490: note = Ascusbbf_308079, encodes 16S rRNA
  source 1..490: mol_type = genomic DNA
agagtttgatcatggctcagaacgaacgttagcggcgcgcctaagacatgcaagtcgagcgagaaagggcttcggccccagtaaagcggcgcacgggtgagtaacacgtaggttatcaacccccgagtggtggataaccctccgaaaggagggctaatacagcatgacgccggcggtttctctggaatcgtcggtcaaagcgggcctcttcatgaaagctcgcgctcgaggatgagcctgcggcccatcaggtagttggcggagtaacagcccaccaagcctaagacgggtagctggtctgagaggatgaacagccacactggaactgagacacggtccagactcctacgggaggcagcagtcgggaatcttccgcaatgggcgaaagcctgacggagcgacgccgcgtgagtgatgaaggccttcgggttgtaaagctctgtggggagagaagaataagcgtcggcgaatacctggcgtgatgacggta

SEQ ID NO: 8181 - DNA, 490 bp, unidentified
  misc_feature 1..490: note = Ascusbbf_728199, encodes 16S rRNA
  source 1..490: mol_type = genomic DNA
agagtttgatcatggctcaggatgaacgctagcggcaggcttaacacatgcaagtcgaggggtaacagggagtagcaatactctgctgacgaccggcgcacgggtgcgtaacgcgtatgcaacctaccttgtacagggggataacggggtgaaaatcccactaatatcccatggtgttggagattcgcatgtttctccaactaaagcttcggtggtacaagatgggcatgcgtgacattagctagttggtagggcaacggcctaccaaggcgacgatgtctaggggagctgagaggcttatcccccacactggtactgagacacggaccagactcctacgggaggcagcagtgaggaatattggtcaatggacggaagtctgaaccagccatgccgcgtggaggaagaaggtcctatgggttgtaaactccttttgttccggagtaataagtgccttgcgaggcacgatgagagtacgggacgaataagc

SEQ ID NO: 8182 - DNA, 490 bp, unidentified
  misc_feature 1..490: note = Ascusbbf_393265, encodes 16S rRNA
  source 1..490: mol_type = genomic DNA
agagtttgatcctggctcaggacgaacgctggcggcgtgcttaacacatgcaagtcgaacgaggttatattccggaaggcttcggccggaagggagataaccgagtggcggacgggtgagtaacgcgtgaggaacctgtcttctacagggggataacggtccgaaaggattgctaataccgcataagaccacaccggcgcatgccggaggggtcaaaggagaaatccggtagaaggtggactcgcgtcccattagatagttggtgaggtaacggcccaccaagtcgacgatgggtagccgacctgagagggtgatcggccacattggaactgagatacggtccagactcctacgggaggcagcagtggggaatattgggcaatgggcgaaagcctgacccagcaacgccgcgtgagggaagaaggtcttcgggttgtaaacctctgtccttggtgaaaagaaaggatggtagccaaggaggaagctccgg

SEQ ID NO: 8183 - DNA, 490 bp, unidentified
  misc_feature 1..490: note = Ascusbbf_337064, encodes 16S rRNA
  source 1..490: mol_type = genomic DNA
agagtttgatcatggctcaggacgaacgctggcggcgtgcctaacacatgcaagtcgagcgaagcgatcgggaagggagacttcggtcaaacggaacgattgactgagcggcggacgggtgagtaacgcgtgagcaacctggcctttacagggggataacagttggaaacgactgctaataccgcataagaccacgagatggcatcatcagggggtcaaagaattattggtaaaggatgggctcgcgtcccattagttagttggcggggtaacggcccaccaaggcgacgatgggtagccgacctgagagggtgatcggccacattggaactgagacacggtccaaactcctacgggaggcagcagtggggaatattgggcaatgggcgaaagcctgacccagcaacgccgcgtgaaggaagaaggtcttcggattgtaaacttttgttgtcagtgaagaggaaggacagtagctgacgaggaagccccg

SEQ ID NO: 8184 - DNA, 490 bp, unidentified
  misc_feature 1..490: note = Ascusbbf_143981, encodes 16S rRNA
  source 1..490: mol_type = genomic DNA
agagtttgatcctggctcagaacgaacgctggcggcgcgtcttaagcatgcaagtcgaacgggaatgcggtgcttgcaccgcacgagagtggcggactggtgagtaacgcgtgggtgacgtaccccccggacggggatagcccttagaaataaggggtaataccggatacggttccgtgtgtcagaggcacggaaggaaaggagcttcggctccgccgggggagcggcctgcgtcccatcagctggttggcggggtaacggcccaccaaggcaatgacgggtatccggcctaagagggtgaacggacacattgggactgagatacggcccagactcctacgggaggcagcagctaagaatattccgcaatgggggaaaccctgacggagcgacgccgcgtggacgatgaaggccggaaggttgtaaagtcctttagtccgtgaggaataacgccggagggaatgccggcggatgactgtagcggaagaat

SEQ ID NO: 8185 - DNA, 490 bp, unidentified
  misc_feature 1..490: note = Ascusbbf_136630, encodes 16S rRNA
  source 1..490: mol_type = genomic DNA
agagtttgatcatggctcaggatgaacgctggcggcatgcctaacacatgcaagtcgaacggagttataagatagcttgctattgagtaacttagtggcggacgggtgagtaacgcgtgagtaacctgcctcttagagggggataacattctgaaaagaatgctaataccgcatataatgacgaaaccgcatggttttgtcatgaaaggagcaatccgctaagagatggactcgcgtctgattagctagatggtggggtaacggctcaccatggcgacgatcagtagccggactgagaggttgaacggccacattgggactgagacacggcccagactcctacgggaggcagcagtgggggatattacgcaatgggggaaaccctgacgtagcaatgccgcgtgaaggaagaaggttttcggattgtaaacttcttttgtcagggacgataatgacggtacctgacgaataagctccggctaactatgtg

SEQ ID NO: 8186 - DNA, 490 bp, unidentified
  misc_feature 1..490: note = Ascusbbf_94072, encodes 16S rRNA
  source 1..490: mol_type = genomic DNA
agagtttgatcatggctcaggatgaacgctggcggcgtgcataacacattcaagtcgaacggagcggtttccttcgggggatcgcttagtggcggacgggtgagtaacgcgtgagtaacctgccatacacagggggataacgaccggaaacagtcgctaataccgcataacgcatgaaggtcacatggtctttatgccaaagatttatcggtgtatgatggactcgcgtccgattaggcagttggcggggcaacggcccaccaaaccgacgatcggtagccgaactgagaggttgaacggccacattggaactgagatacggtccagactcctacgggaggcagcagtggggaatattgggcaatgggcgcaagcctgacccagcgacgccgcgtgagggaagaaggtcttcggattgtaaacctctttcagcagggaagaagtcaatgacggtacctgcagaagaagtcacggctaactacgtgccagc

SEQ ID NO: 8187 - DNA, 490 bp, unidentified
  misc_feature 1..490: note = Ascusbbf_270131, encodes 16S rRNA
  source 1..490: mol_type = genomic DNA
agagtttgatcatggctcaggacgaacgctggcggcatgcctaatacatgcaagtcgagcgaacagataaggagcttgctcctttgacgttagcggcggatgggtgagtaacacgtgggcaacctgccctgcagatggggataactccgggaaaccggggctaataccgaatgatcagtttgttcgcatgaacaaactctaaaagacggtttcggctgtcactgcaggatgggcccgcggcgcattagctagttggtgggataacggcctaccaaggcaacgatgcgtagccgacctgagagggtgatcggccacactgggactgagacacggcccagactcctacgggaggcagcagtagggaatcttccacaatggacgaaagtctgatggagcaatgccgcgtgagtgaagaaggttttcggatcgtaaaactctgttgtgagggaagaacaagtatgggagtaactgcccgtaccttgacggtacc

SEQ ID NO: 8188 - DNA, 490 bp, unidentified
  misc_feature 1..490: note = Ascusbbf_119086, encodes 16S rRNA
  source 1..490: mol_type = genomic DNA
agagtttgatcatggctcaggatgaacgctagctacaggcttaacacatgcaagtcgaggggcagcatgggtgtagcaatacacctgatggcgaccggcgcacgggtgcgtaacacgtatccaatctacccaatgctcggggatagccttccgaaagaaagattaatacccgatggtgtcatttcagggcctcctgtgatgactaaagattcatcggcattggatgaggatgcgtccgattaggtagtaggcggggcaacggcccacctagccgacgatcggtaggggttctgagaggaaggtcccccacactggaactgagacacggtccagactcctacgggaggcagcagtgaggaatattggtcaatgggcgcgagcctgaaccagccaagtagcgtgaaggatgactgccctacgggttgtaaacttcttttgcatgggaataacgtggcccacttgtgggctattgcatgtaccttgcgaataa

SEQ ID NO: 8189 - DNA, 490 bp, unidentified
  misc_feature 1..490: note = Ascusbbf_160406, encodes 16S rRNA
  source 1..490: mol_type = genomic DNA
agagtttgatcctggctcaggacgaacgctggcggcatgcctaacacatgcaagtcgaacggaactgtggagcttgctttacagtttagtggcggacgggtgagtaacgcgtgagtaacctgcctttcagtggggaataatattctgaaaagagtactaataccgcataatgtacggaaaccgcatgatttttgtaccaaagatttatcgctgagagatggactcgcgtccgattagccagttggtggggtaacggcctaccaaagcaacgatcggtagccggactgagaggttgaacggccacattgggactgagacacggcccagactcctacgggaggcagcagtgggggatattgtgcaatgggggaaaccctgacacagcaatgccgcgtgaaggatgaaggtcttcggattgtaaacttcttttgtcaaggacgaagttctgacggtacttgacgaataagctccggctaactatgtgccagca

SEQ ID NO: 8190 - DNA, 474 bp, unidentified
  misc_feature 1..474: note = Ascusbbf_57216, encodes 16S rRNA
  source 1..474: mol_type = genomic DNA
agagtttgatcctggctcagattgaacgctggcggcatggctaatgcatgcaagtcgaacgcaagcccttcggggcgaaagtggcgaaagggcgagtaacacgatcgaacgtaccccaaggtggaggatagcgtcgagaaatcggcagtaatactccatgtgctcttcggaggaaagctttggcgccttgggagcggcgatcgtcctatcaggtagttggtgaggtaaaggctcaccaagccgaagacgggtagcgggtgtgagagcatgacccgccgcatcggaactgagacactgtccggactcctacgggaggctgcagcgacgaatcttccgcaatgggcgcaagcctgacggagcaatgccgcgtgtgggatgaagcatcttcgatgtgtaaaccactgtcagattctaggaacactgaccagaatcagaggaagggccggctaacctcgtgccagcagccgcggtaat

SEQ ID NO: 8191 - DNA, 490 bp, unidentified
  misc_feature 1..490: note = Ascusbbf_149654, encodes 16S rRNA
  source 1..490: mol_type = genomic DNA
agagtttgatcatggctcagaacgaacgctggcggcgcgtcttaagcatgcaagtcgggcgggattacggtgcttgcaccgtatgagagcggcggactggtgagtaacgcgtgggtgacgtaccctccggacggggatagctcctagaaataggaggtaataccggatacggtgcctgctgtcagagggcaggcaggaaagcagcttttgctgcgccgggggagcggcccgcgtgccattagctagtcggcggggtaacggcccaccgaggcgatgatggctacccggcctaagagggtggacgggcacattgggactgagatacggcccagactcctacgggaggcagcagctaagaatattccgcaatgggggaaaccctgacggagcgacgccgcgtggacgatgaaggccggaaggttgtaaagtccttttatgactgaagaataaggagtgtgagagaaacgcattctggtgacggtaggtcatg

SEQ ID NO: 8192 - DNA, 470 bp, unidentified
  misc_feature 1..470: note = Ascusbbf_64342, encodes 16S rRNA
  source 1..470: mol_type = genomic DNA
agagtttgatcatggctcagaacgaacgctggcggcaggcctaacacatgcaagtcgaacgctgtagcaatacagagtggcagacgggtgagtaacgcgtgggaattttcccagtggtacggaatagctcagggaaacttggggtaataccgtataagcccttcgggggaaagatttatcgccattggatgagcccgcgttggattagctagttggtgaggtaatggctcaccaaggcgacgatccatagctggtctgagaggatgaccagccacactgggactgagacacggcccagactcctacgggaggcagcagtggggaatattggacaatgggcgcaagcctgatccagccatgccgcgtgagtgacgaaggtcttcggattgtaaagctcttttagcagggacgataatgacggtacctgcagaataagccccggctaacttcgtgccagcagccgcggtaat

SEQ ID NO: 8193 - DNA, 490 bp, unidentified
  misc_feature 1..490: note = Ascusbbf_189176, encodes 16S rRNA
  source 1..490: mol_type = genomic DNA
agagtttgatcatggctcaggataaacgctggcggcgtgcataacacattcaagtcgaacggactgattcggaagcttgcttccgatgaaagttagtggcggacgggtgagtaacgcgtgagcaacctgcctttgtgaggggaataacatcgggaaaccggtgctaataccgcatgatgcgtagaggggacatccccattacgccaaagatttatcgcacaaagatgggctcgcgtctgattagctggttggtgaggtaacggcccaccaaggcgacgatcagtagccggactgagaggttgaacggccacattggaactgagagacggtccagactcctacgggaggcagcagtggggaatattgggcaatgggcgcaagcctgacccagcgacgccgcgtgagggaagaaggtcttcggattgtaaacctttgtagacagggacgaaacaaatgacggtacctgtaaagtaagccacggctaactacg

SEQ ID NO: 8194 - DNA, 490 bp, unidentified
  misc_feature 1..490: note = Ascusbbf_82777, encodes 16S rRNA
  source 1..490: mol_type = genomic DNA
agagtttgatcatggctcaggatgaacgctagcggcaggcttaacacatgcaagtcgaggggcagcgcgggtagcaatacttggcggcgaccggcgaaagggtgagtaacgcgtgagcaacatacccgttggtgggggataggaggtggaaacgccttgtaataccccataggatacgaagtggcatcacattgtattgaaagattcattgtcaacggattggttcgcgtgccattaggtagacggcggggtaacggcccaccgtgccgacgatggctaggggttctgagaggaaggtcccccacattggaactgagacacggtccagactcctacgggaggcagcagtgaggaatattggtcaatggccggaaggctgaaccagccatgccgcgtgaaggaagaaggccctatgggtcgtaaacttcttttgatgtggagcaataagggccacgcgtggtccgatgagagtacacgtcgaataagcatc

SEQ ID NO: 8195 - DNA, 490 bp, unidentified
  misc_feature 1..490: note = Ascusbbf_724430, encodes 16S rRNA
  source 1..490: mol_type = genomic DNA
agagtttgatcatggctcagaacgaacgctggcggcgcgtcttaagcatgcaagtcgaacggcaaggcgggagcttgctcccgccccagagtggcggactggtgagtaacacgtggatgacataccccccggacggggatagccggtagaaataccgggtaataccggatacggccgcacgggctagagccgtgcggggaaaggagccaaggctccgccgggggaatggtccgcggcctaccagcttgttggcggggtaacggcccaccaaggcgatgacgggtatccggcctgagagggggatcggacacattgggactgagatacggcccagactcctacgggaggcagcagctaagaatattccgcaatggacggaagtctgacggagcgacgccgcgtgaacgaagaaggccggaaggttgtaaagttcttttggacgtgaggaataagcgccgcagggaatggcggcgcggtgactgtagcgtct

SEQ ID NO: 8196 - DNA, 490 bp, unidentified
  misc_feature 1..490: note = Ascusbbf_1894233, encodes 16S rRNA
  source 1..490: mol_type = genomic DNA
agagtttgatcctggctcagaacgaacgttagcggcgcgcttaacacatgcaagtcgcacgagaaagggcttcggccccggtacagtggcgcacgggtgagtaacacgtgggtaacctgccctcgagcaggggataacattccgaaaggagtgctaataccgcataagaccacgacctcgaaaggggttgaggtaaaagctggcctctatacataagctagcacttgaggatgggcccgcggcgcatcaggtagttggtgaggtaatggctcaccaagccaaagacgcgtagctggtctgagaggatgatcagccacactggaactgagacacggtccagactcctacgggaggcagcagtggggaatcttgcgcaatgggcgaaagcctgacgcagcgacgccgcgtgagtgatgaaggccttcgggttgtaaagctctgtggggcgagacgaataagtgcagcctaatacgttgcatgatgacggtat

SEQ ID NO: 8197 - DNA, 480 bp, unidentified
  misc_feature 1..480: note = Ascusbbf_92575, encodes 16S rRNA
  source 1..480: mol_type = genomic DNA
agagtttgatcctggctcagaacgaacgctggcggcaggcctaacacatgcaagtcgaacgagaagccaccttcgggtggtggaaagtggcagacgggtgagtaacacgtgggaacgtgccctttggttcggaacaactctgggaaactggagctaataccggataagcccttcgggggaaagatttatcgccaaaggatcggcccgcgtctgattagctagttggtggggtaatggctcaccaaggcgacgatcagtagctggtctgagaggatgatcagccacactgggactgagacacggcccagactcctacgggaggcagcagtggggaatattggacaatgggcgcaagcctgatccagccatgccgcgtgagtgatgacggccttagggttgtaaagctctttcgccagggacgataatgacggtacctggataagaagccccggctaacttcgtgccagcagccgcggtaat

SEQ ID NO: 8198 - DNA, 490 bp, unidentified
  misc_feature 1..490: note = Ascusbbf_359613, encodes 16S rRNA
  source 1..490: mol_type = genomic DNA
agagtttgatcatggctcagattgaacgctggcggcaggcttaacacatgcaagtcgggcggaaacgatgatagcttgctatcaggcgtcgagcggcggacgggtgagtaatgcataggaatctacctagtagtgggggataacattcggaaacggatgctaataccgcataattcctacgggggaaagcaggggatcttcggaccttgcgctattagatgagcctatgtcggattagctagttggtggggtaatagcctaccaaggcgacgatccgtagctggtttgagaggatgatcagccacactgggactgagacacggcccagactcctacgggaggcagcagtggggaatattggacaatgggcgcaagcctgatccagccatgccgcgtgtgtgaagaaggccttagggttgtaaagcactttcattgaggaggaaggctatttggctaatacccaaatagattgacgttactcaaagaagaa

SEQ ID NO: 8199 - DNA, 490 bp, unidentified
  misc_feature 1..490: note = Ascusbbf_715288, encodes 16S rRNA
  source 1..490: mol_type = genomic DNA
agagtttgatcatggctcaggacgaacgctggcggcgtgcctaacacatgcaagtcgagcggggatgcgggaagtgagagcttcggcaggaacggaacgtattctagcggcggacgggtgagtaacgcgtgaatgatctgtcccggacagggggataacacttggaaacaggtgctaataccgcatgagaccacagcgtcgcatggcgcaggggtcaaaggagagatccggtttggggtgagttcgcgtctgattagctggttggtgaggtaacggcccaccaaggcgacgatcagtagccgacctgagagggtgatcggccacattggaactgagacacggtccaaactcctacgggaggcagcagtgggaatattgggcaatgggcgaaagcctgacccagcaacgccgcgtgagggaagaaggttttcggattgtaaacctctgttgtggatgacgaaggaagtgacggtaatccacaaggaagccc

SEQ ID NO: 8200 - DNA, 490 bp, unidentified
  misc_feature 1..490: note = Ascusbbf_339667, encodes 16S rRNA
  source 1..490: mol_type = genomic DNA
agagtttgatcatggctcaggacgaacgctggcggcgtgcctaacacatgcaagtcgaacggagtaaagagcttcggttttttacttagtggcgaacgggtgagtaacgcgtgagcaacctgactctttgagggggataacagtcggaaacaactgctaataccgcataagaccacgaaccggcatcggtatgaggtcaaaggagcaatccgcagagagaggggctcgcgtcccattagatagttggcggggcaacggcccaccaagtccgcgatgggtagccgagctgagaggctgatcggccacactggaactgagacacggtccagactcctacgggaggcagcagtggggaatattgggcaatgggcgcaagcctgacccagcaacgccgcgtgagggaagaaggctttcgggttgtaaacctctgtccttggtgacgaattctgacggtagccaaggaggaagccccggctaactacgtgccagc

SEQ ID NO: 8201 - DNA, 490 bp, unidentified
  misc_feature 1..490: note = Ascusbbf_172073, encodes 16S rRNA
  source 1..490: mol_type = genomic DNA
agagtttgatcctggctcaggatgaacgctggcggcgtgcctaacacatgcaagtcgaacggaactttttacggacaagacttcggtcaagtctgtttcaagtttagtggcggacgggtgagtaacgcgtgagcaacctgcctttcagagggggataacgttcggaaacgatcgctaataccgcataacatagggatatcgcatggtaaccctatcaaagattttatcgctgaaagatgggctcgcgtccgattaggtagttggtgaggtaacggcccaccaagccgacgatcggtagccggactgagaggttgaacggccacattgggactgagacacggcccagactcctacgggaggcagcagtggggaatattgcacaatgggcgcaagcctgatgcagcaacgccgcgtgagggaagacggttttcggattgtaaacctctgttcttagtgacgaagaagtgacggtagctaaggagcaagccac

SEQ ID NO: 8202 - DNA, 490 bp, unidentified
  misc_feature 1..490: note = Ascusbbf_303182, encodes 16S rRNA
  source 1..490: mol_type = genomic DNA
agagtttgatcctggctcaggattaacgctggcggcgtgcctaatacatgcaagtcgaatggttagcttgctaaccatggcgaacgggtgagtaacacgtaggcaacctgtctaagagacgaggataaccattggaaacgatggataatactggataggatattggaaggcatcttctgatatttaaagatttatcgctaatagaggggcctgcggcgcattagctagttggtgaggtaacggcccaccaaggcgatgatgcgtagccggactgagaggttgaacggccacaatgggactgagaacggcccatactcctacgggaggcagcagtagggaattttcggcaatggacgaaagtctgaccgagcaacgccgcgtgaacgaagaagtatttcggtatgtaaagttcttttatttgggaagaaaatacattgactgtaccaaatgaataagctccggctaactacgtgccagcagccgcggtaat

SEQ ID NO: 8203 - DNA, 490 bp, unidentified
  misc_feature 1..490: note = Ascusbbf_296087, encodes 16S rRNA
  source 1..490: mol_type = genomic DNA
agagtttgatcatggctcaggacgaacgctggcggcgtgcctaacacatgcaagtcgaacgagaaattaagagtagaatcttcggaggaaatgattaatggacagtggcggacgggcgagtaacgcgtgagtaacctgcccataagaaagggatagccgatggaaacgtcgagtaataccttatgacatagatacctcgcatggggaatctatcaaagatttatcgcttatggatggactcgcgtcagattagatagttggagaggtaacggctcaccaagtcgacgatctgtagccgaactgagaggttgaacggccgcattgggactgagacacggcccagactcctacgggaggcagcagtgggggatattgcgcaatggggggaaccctgacgcagcaacgccgcgtgcaggaagaaggtcttcggattgtaaactgttgtcgcaggggaagaagaaagtgacggtaccctgtgagaaagtcacgg

SEQ ID NO: 8204 - DNA, 490 bp, unidentified
  misc_feature 1..490: note = Ascusbbf_1730912, encodes 16S rRNA
  source 1..490: mol_type = genomic DNA
aggtttgatcctggctcagagttaacgctggcatcgtgcataacacatgcaagtcgaacgggacttgccttggtagcaataccgaggtaagtttagtggcagacgggtgagtaatgtataagaaacctacctctgagtggggaataacagtccgaaaggattgctaataccccataacataattaagcggcatcgcttgattatcaaagatttatcgcttggagacggtcttatattctatcagctagttggcagtgtaacggactaccaaggcgacgacggatagccggcctgaaagggcgaccggccacaagggcactgagacacgggccctactcctacgggaggcagcagtggggaattttggacaatgggcgcaagcctgatccagcaacgatgcgtggaggatgaaggttctcggattgtaaactccttttgtaagggaagaaaaaaaatgacggtaccttacgaataagccacggctaactac

SEQ ID NO: 8205 - DNA, 490 bp, unidentified
  misc_feature 1..490: note = Ascusbbf_381041, encodes 16S rRNA
  source 1..490: mol_type = genomic DNA
agagtttgatcctggctcaggatgaacgctggcggcaggcttaatacatgcaagtcgaacggtaaggccgagcgtagcaatacgtgaggtacacgagtggcgcacgggtgcgtaacgcgtatgcaacctgccccgcaccgggacaaaacagctggaaacggctgctaatatcccatggccacccgaggggacatccccatgggtgtaaagatttatcggtacgggatgggcatgcgtattattaggtagttggcggggtaacggcccaccaagccgacgatgattaggggtcctgagagggttaacccccacactggaactgagacacggtccagactcctacgggaggcagcagtagggaatattgggcaatgggagcaatcctgacccagccatgccgcgtgaaggaagacggccctatgggttgtaaacttcttttgccgcagagtaaacccggtcacgtgtggccggttgagagtatgcggcgaat

SEQ ID NO: 8206 - DNA, 490 bp, unidentified
  misc_feature 1..490: note = Ascusbbf_227504, encodes 16S rRNA
  source 1..490: mol_type = genomic DNA
agagtttgatcctggctcaggataaacgctggcggcgcacataagacatgcaagtcgaacggacgagtagaattcttttagttttctacaagttagtggcggactggtgagtaacgcgtgagcaacctacctacaagaggggaacaacggagagaaatttccgctaataccgcataagctgataaaatcgcatgattcagtcagaaaaggagcaatccgcttgtagatgggctcgcgtccgattagctagttggtggggtaaaggcctaccaaggcaacgatcggtagccggactgagaggttgaacggccacattgggactgagatacggcccagactcctacgggaggcagcagtcgggaatattgcgcaatggaggaaactctgacgcagtgacgccgcgtataggaagaaggttttcggattgtaaactattgtcgttagggaagagaaaggacggtacctaaggaggaagccccggctaactatg

SEQ ID NO: 8207 - DNA, 490 bp, unidentified
  misc_feature 1..490: note = Ascusbbf_710925, encodes 16S rRNA
  source 1..490: mol_type = genomic DNA
agagtttgatcatggctcaggacgaacgctggcggcgtgcttaacacatgcaagtcgaacgaggcttaagaacggaagtcttcggatggaaggtcataagtcgagtggcggacgggtgagtaacgcgtgagcaacctgtcttatacagggggataacactccgaaaggagcgctaataccgcataagaccacgatgccgcatggcattggggtaaaaggagcgatccggtataaggtgggctcgcgtcccattagatagttggcagggtaacggcctaccaagtcgacgatgggtagccgacctgagagggtgatcggccacattggaactgagatacggtccagactcctacgggaggcagcagtggggaatattgggcaatgggcgaaagcctgacccagcaacgccgcgtgagggatgaaggtcttcgggttgtaaacctctgtcctaagtgaaaaggaaggatggtagcttaggaggaagctccgg

SEQ ID NO: 8208 - DNA, 490 bp, unidentified
  misc_feature 1..490: note = Ascusbbf_299961, encodes 16S rRNA
  source 1..490: mol_type = genomic DNA
agagtttgatcatggctcaggatgaacgctggcggcgtgcctaacacatgcaagtcgagcgagaatcatctgaatgaaacttcggtcgaatgacgatgaggaaagcggcggacgggtgagtaacgcgtaggcaacctgccctttgcagagggatagccactggaaacggtgattaaaacctcataacacgggactgagacatctcagacccgccaaagatttatcggcaaaggatgggcctgcgtctgattagctagttggtgaggtaacggcccaccaaggcaacgatcagtagccgacctgagagggtaatcggccacattggaactgagacacggtccaaactcctacgggaggcagcagtggggaatattgcacaatgggggaaaccctgatgcagcaacgccgcgtgaaggatgaaggcctttgggtcgtaaacttctgtcctaggggacgaaacaaatgacggtacccttggaggaagccccgg

SEQ ID NO: 8209 - DNA, 490 bp, unidentified
  misc_feature 1..490: note = Ascusbbf_1465876, encodes 16S rRNA
  source 1..490: mol_type = genomic DNA
agagtttgatcatggctcaggacggacgctggcggcgtgcctaatacatgcaagtagaacgctgaaattggtgcttgcaccaatggatgagttgcgaacgggtgagtaacgcgtaggtaacctgcctggtagcgggggataactattggaaacgatagctaataccgcataatagttttggtcgcatgaccgagacttgaaaggagcaactgcttcactaccagatggacctgcgttgtattagctagttggtgaggtaacggctcaccaaggcgacgatacatagccgacctgagagggtgatcggccacactgggactgagacacgacccagactcctacgggaggcagcagtagggaatcttcggtaatgggggcaaccctgaccgagcaacgccgcgtgagtgaagaaggttttcggatcgtaaagctctgttgtaagtcaagaataggtgtgagagtggaaagttcacactatgacggtagctta

SEQ ID NO: 8210 - DNA, 490 bp, unidentified
  misc_feature 1..490: note = Ascusbbf_144397, encodes 16S rRNA
  source 1..490: mol_type = genomic DNA
agagtttgatcatggctcaggatgaacgctggcggcgcgcctaacacatgcaagtcgaacggcgacggggcttcggcccctgaacagtggcggacgggtgagtaacgcgtgagtaacctgccccggtgagcggaataacgtccggaaacagacgctaataccgcatgacacattccatcggcatcggagggatgtcaaagatcaatcgcaccgggatggactcgcgtcccattagatagttggcggggcaacggcccaccaagtcagcgatgggtagccggactgagaggttgaacggccacattggaactgagagacggtccagactcctacgggaggcagcagtggggaatattgggcaatgggcgaaagcctgacccagcgacgccgcgtgagcgaagaaggtcttcggattgtaaagctctgttgacagggacgataatgacggtacctgtcgaggaagccacggctaactacgtgccagcagccg

SEQ ID NO: 8211 - DNA, 490 bp, unidentified
  misc_feature 1..490: note = Ascusbbf_771322, encodes 16S rRNA
  source 1..490: mol_type = genomic DNA
agagtttgatcatggctcaggatgaacgccggcggtgtgcctaatacatgcaagtcgaacgcgttggcccaactgattgattgtgcttgcacaggattgacgttggtttcccaacgagtggcggacgggtgagtaacacgtaggcaacctgccccgaagcgggggacaacatttggaaacaagtgctaataccgcataacaactttgaccgcctggtcaaagcttaaaagatggtttcggctatcacttcgggatgggcctgcggcgcattagcttgttggtggggtaacggcctaccaaggcgatgatgcgtagccgagttgagagactgatcggccacaatgggactgagacacggcccatactcctacgggaggcagcagtagggaatcttccacaatgggcgcaagcctgatggagcaacaccgcgtgagtgaagaagggtttcggctcgtaaagctctgttgttgaagaagaatgtgcaagagag

SEQ ID NO: 8212 - DNA, 470 bp, unidentified
  misc_feature 1..470: note = Ascusbbf_72134, encodes 16S rRNA
  source 1..470: mol_type = genomic DNA
agagtttgatcatggctcagaacgaacgctggcggcaggcctaacacatgcaagtcgaacgctgtagcaatacagagtggcagacgggtgagtaacacgtgggaacctaccctttggttcggaatagctcagggaaacttgaggtaataccggataagcccctagggggaaagattcatcgccgaaggatgggcccgcgtcggattagctagttggtggggtaatggcccaccaaggcgacgatccgtagctggtctgagaggatgatcagccacactgggactgagacacggcccagactcctacgggaggcagcagtggggaatattggacaatgggggcaaccctgatccagccatgccgcgtgagtgacgaaggtcttcggattgtaaagctcttttggcggggacgataatgacggtacccgcagaataagccccggctaacttcgtgccagcagccgcggtaat

SEQ ID NO: 8213 - DNA, 490 bp, unidentified
  misc_feature 1..490: note = Ascusbbf_121678, encodes 16S rRNA
  source 1..490: mol_type = genomic DNA
agagtttgatcatggctcaggatgaacgctggcggcgtgcctaatacatgcaagtcgaacggagttaggaaagcttgcttttctgacttagtggcgaacgggtgagtaacacgtaggtaacctgcctttcagcttgggatacccagaggaaactttggctaataccggataacaacaatcgaggcatctcggatgtttgaaaggccctgcaaggggtcactgaaagatggacctgcggcgcattagctagttggtgagataacagcccaccaaggcgaggatgcgtagccgaactgagaggttgatcggccacattggaactgagacacggtccaaactcctacgggaggcagcagtaaggagttttcggcaatgggggaaaccctgaccgagcaacgccgcgtgagtgatgacggccctatgggttgtaaagctctgttgtagagaacgaatggtagcttcaggaaatgggagctatttgacggtactt

SEQ ID NO: 8214 - DNA, 472 bp, unidentified
  misc_feature 1..472: note = Ascusbbf_78798, encodes 16S rRNA
  source 1..472: mol_type = genomic DNA
agagtttgatcatggctcagaacgaacgctggcggcatgcctaacacatgcaagtcgaacggatggcttcggccatcagtggcgcacgggtgagtaacgcgtgggaatctgcccagcagtgggggataaccttgggaaactgaggctaataccgcatacgcccctcgggggaaaggcttgccgctgctggaggagcccgcgtcggattaggtagttggtggggtaatggcctaccaagcctgtgatccgtagctggtctgagaggatgatcagccacactgggactgagacacggcccagactcctacgggaggcagcagtggggaatattggacaatgggcgcaagcctgatccagcaatgccgcgtgagtgatgaaggccttcgggttgtaaagctctttcacccacgacgatgatgacggtagtgggagaagaagccccggctaacttcgtgccagcagccgcggtaat

SEQ ID NO: 8215 - DNA, 490 bp, unidentified
  misc_feature 1..490: note = Ascusbbf_271111, encodes 16S rRNA
  source 1..490: mol_type = genomic DNA
agagtttgatcatggctcagaacgaacgctggcggtgcgtcttaagcatgcaagtcgaacggcaagatagtagcttgctactatcctagagtggcggactggtgagtaacacgtgggtgacataccctttggctggggatagccggtagaaataccgggtaataccgaataagatccttactgttagagggtgaggatgaaaggagcttcggcttcaccgaaggaatggcccgcgcactattagctagttggtgaggtaacggcttaccaaggcaacgatagttatccggcctaagagggtgatcggacacattgggactgagatacggcccagactcctacgggaggcagcagctaagaatattccgcaatggacgaaagtctgacggagcgacaccgcgtggatgatgaaggccggaaggttgtaaaatccttttatttgcgaagaataatcaatataggtaatgatattgaggtgacggtaacaaat

SEQ ID NO: 8216 - DNA, 490 bp, unidentified
  misc_feature 1..490: note = Ascusbbf_722252, encodes 16S rRNA
  source 1..490: mol_type = genomic DNA
agagtttgatcctggctcaggataaacgctggcggcgcacataagacatgcaagtcgaacggaagtcgttgtaatgaaatggacatgaacagagaacttgttcaaagggaatgaaaattgacttacaacaatggctttagtggcggactggtgagtaaaacgtaagcaacctggctattagaggggaacaacagttagaaatgactgctaataccgcatatgccataataaccgcatggttaaagtgggaaaggagaaatccgctgatagatgggcttacggctgattagctagttggtgtggtaaaggcataccaaggcgacgatcagtagccggactgagaggttaaacggccacattgggactgagatacggcccagactcctacgggaggcagcagtcgggaattttgcgcaatggaggaaactctgacgcagtgacgccgcgtgcaggaagaaggttttcggattgtaaactgctttagacaggg

SEQ ID NO: 8217 - DNA, 470 bp, unidentified
  misc_feature 1..470: note = Ascusbbf_664012, encodes 16S rRNA
  source 1..470: mol_type = genomic DNA
agagtttgatcatggctcagagcgaacgctggcggcaggcttaacacatgcaagtcgagcgggcccttcggggtcagtggcagacgggtgagtaacgcgtgggaacgtaccctttggttcggaataactcagggaaacttgagctaataccggatacgcccttatggggaaaggcttgctgccgaaggatcggcccgcgtctgattagctagttggtgaggttacggctcaccaaggcgacgatcagtagctggtctgagaggatgatcagccacactgggactgagacacggcccagactcctacgggaggcagcagtggggaatattggacaatgggggcaaccctgatccagccatgccgcgtgagtgatgacggccttagggttgtaaagctcttttctccgggacgataatgacggtaccggaggaataagccccggctaacttcgtgccagcagccgcggtaat

SEQ ID NO: 8218 - DNA, 490 bp, unidentified
  misc_feature 1..490: note = Ascusbbf_1875750, encodes 16S rRNA
  source 1..490: mol_type = genomic DNA
agagtttgatcatggctcaggatgaacgctggcggcatgcctaagacatgcaagtcgaacgagatggtccaatgaagatggagtgcttgcacaaagttggatttgggttgccatctagtggcagacgggtgagtaacacgtgggtaatctacctcagagactgggataacggctagaaatggtcgctaataccggatgattcataattagataactagttatgctaaaaggagcttcggcttcactttgagatgagcttgcggtgtattagctagttggtggggtaatggcctaccaaggcaacgatgcatatccgagctgagaggctgatcggacacattggaactgagacacggtccagactcctacgggagacagcagttaggaatattcgtcaatgggggaaaccctgaacgagcaatgccgcgtgagtgatgaaggccctatgggtcgtaaaactctgttgtaaaggaagaacacctaagatagg

SEQ ID NO: 8219 - DNA, 490 bp, unidentified
  misc_feature 1..490: note = Ascusbbf_266530, encodes 16S rRNA
  source 1..490: mol_type = genomic DNA
agagtttgatcatggctcaggataaacgctagcggcaggcctaacacatgcaagtcgagcggcagcgggatgtagcaatacattgccggcgagcggcggacgggtgagtaacgcgtatgcaacctgcccaccacacggagatagccgaccgaaaggacgattaaactccgatggcacctcatcaaggcatctttttgaggttaaatatttataggtggtggatgggcatgcgtggcattagttagttggcggggcaacggcccaccaagacgatgatgcctatgggttctaaaaggaagatcccacacatcggtactgagacacggaccgaactcctacgggaggcagcagtgaggaatattggacaatgggggcaaccctgatccagccaaaccgcgtgggggaaggaggccgttaaggtcgtaaaccccttttatatgggagcaatccgtcctacgtgtagggcgttgagagtaccatttgaataagc

SEQ ID NO: 8220 - DNA, 490 bp, unidentified
  misc_feature 1..490: note = Ascusbbf_1809163, encodes 16S rRNA
  source 1..490: mol_type = genomic DNA
agagtttgatcatggctcaggacgaacgctggcggcgtgcctaacacatgcaagtcgaacggactgattcgcttcggtgatgaaagttagtggcggacgggtgagtaacgcgtgaggaacctgcctttcagagggggataacgtttggaaacgaacgctaataccgcataacgcatttttatcgcatggtagagatgccaaaggagcaatccgctgaaagatggcctcgcgtctgattagatagttggtggggtaacggcccaccaagtcgacgatcagtagccggactgagaggttgaacggccacattgggactgagacacggcccagactcctacgggaggcagcagtgagggatattgcacaatgggcgaaagcctgatgcagcaacgccgcgtgagggatgacggttttcggattgtaaacctctgtcttcggtgacgaaacaaatgacggtagccggggaggaagccacggctaactacgtgcc

SEQ ID NO: 8221 - DNA, 490 bp, unidentified
  misc_feature 1..490: note = Ascusbbf_723658, encodes 16S rRNA
  source 1..490: mol_type = genomic DNA
agagtttgatcatggctcaggatgaacgctagcggcaggcttaacacatgcaagtcgaggggtaacgcggggtagcaataccttggcgacgaccggcgcacgggtgcgtaacgcgtatgcaacctacctgtaacaggggaataacggagggaaacttccactaatgccccatattgacacggaatcgcatgtttctgtgtcgaaagcttcggcggttacggacgggcatgcgtgacattaggtagttggtgaggcgacggctcaccaagccgacgatgtctaggggagctgagaggcttatcccccacactggtactgagacacggaccagactcctacgggaggcagcagtgaggaatattggtcaatggagggaactctgaaccagccatgccgcgtgagggatgaaggccctacgggttgtaaacctcttttgctccggagtaataagggtcctgcggggtccgatgagagtacggggcgaataagc

SEQ ID NO: 8222 - DNA, 490 bp, unidentified
  misc_feature 1..490: note = Ascusbbf_148239, encodes 16S rRNA
  source 1..490: mol_type = genomic DNA
agagtttgatcatggctcaggatgaacgctagcggcaggcctaacacatgcaagtcgaggggtagacgtcttcggacgttgagaccggcgcacgggtgcgtaacgcgtatgcaacctgccttccacaaagggatagcccagagaaatttggattaataccttatagtatatcgacccggcatcgggatggtattaaagatttatcggtggaagatgggcatgcgtcccattagcttgttggtaaggtaacggcttaccaaggcaatgatgggtaggggtcctgagagggagatcccccacactggtactgagacacggaccagactcctacgggaggcagcagtgaggaatattggacaatgggcgcaagcctgatccagccatgccgcgtgcaggatgacggtcctatggattgtaaactgcttttatacgggaagaaaccctggctcgtgagccagactgacggtaccgtaggaataaggatcggcta

SEQ ID NO: 8223 - DNA, 490 bp, unidentified
  misc_feature 1..490: note = Ascusbbf_723570, encodes 16S rRNA
  source 1..490: mol_type = genomic DNA
agagtttgatcatggctcagaacgaacgctggcggcgcgtcttaagcatgcaagtcgaatggcaagataagagcttgctcttatcctagaatggcggactggtgagtaacgcgtgggtgacgtaccctttagatggggatagctgttagaaatagcagataataccgaataaggtgcattttgttagagggaatgcaggaaaggatcttttgatccgctgaaggaacggcccgcgtactattagctagttggtgaggtaacggcccaccaaggcgatgatagttacccggcctaagagggggatcgggcacattgggactgagatacggcccagactcctacgggaggcagcagctaagaatattccgcaatgcacgaaagtgtgacggagcgacgccgcgtggatgatgaaggccggaaggttgtaaagtccttttaagtatgaagaataagcattgtgagagaaacgcagtgcggtgacggtagtgct

SEQ ID NO: 8224 - DNA, 490 bp, unidentified
  misc_feature 1..490: note = Ascusbbf_716664, encodes 16S rRNA
  source 1..490: mol_type = genomic DNA
agagtttgatcctggctcaggatgaacgctggcggcgtgcctaatacatgcaagtcgaacgagttgaagagagcttgctctttgatactagtggcgaacgggtgagtaacacgtaggtaacctgcctttaagcttgggatacccagaggaaactttggctaataccggataacaacagatgaggcatctcaactgtttgaaaggccccttcaagggtcacttaaagatggacctgcggcgcattagctagttggtgagataacagcccaccaaggcgaggatgcgtagccgaactgagaggttgatcggccacattggaactgagacacggtccaaactcctacgggaggcagcagtaaggagttttcggcaatgggggaaaccctgaccgagcaacgccgcgtgagtgatgacggccctatgggttgtaaagctcttttattagagacgaatggtgggattaggaaatgaatcccacttgactgtatct

SEQ ID NO: 8225 - DNA, 490 bp, unidentified
  misc_feature 1..490: note = Ascusbbf_457698, encodes 16S rRNA
  source 1..490: mol_type = genomic DNA
agagtttgatcatggctcaggatgaacgctagcggcaggcctaacacatgcaagtcgaggggcagcagggggtagcaataccccgctggcgaccggcggacgggtgcgtaacgcgtatgcaacctacccgtaacaggggaataacggagggaaacctccactaatgccccatatagtcatgggaccgcatggtttcgtgacgaaagcttcggtggttacggacgggcatgcgtggcattaggcggttggcggggtaacggcccaccaaacctacgatgcctaggggagctgagaggctaatcccccacactggtactgagacacggaccagactcctacgggaggcagcagtgaggaatattggtcaatggacggaagtctgaaccagccatgccgcgtgaaggaagacggccctatgggttgtaaacttcttttagccgggagtaataaggcgcacgggctgcgccgatgaaagtaccggcggaataag

SEQ ID NO: 8226 - DNA, 490 bp, unidentified
  misc_feature 1..490: note = Ascusbbf_289700, encodes 16S rRNA
  source 1..490: mol_type = genomic DNA
agagtttgatcatggctcaggatgaacgctagcgacaggcctaacacatgcaagtcgaggggcagcgagaggaaagcttgctttctttgtcggcgaccggcgcacgggtgcgtaacgggtgtgcaatctgcccataatcggggcatagcctaacgaaagttggattaattccccatgtgctatggagaggcatctcttcgtagtgaaacgtaaggattatggttgagcacgcttctgattagatagttggtgaggtaacggctcaccaagtcgacgatcagtaggggttctgagaggaaggtcccccacattggaactgagacacggtccaaactcctacgggaggcagcagtgaggaatattggtcaatggacgagagtctgaaccagccaagtcgcgtgaaggaagacggttctatggattgtaaacttcttttgcacaagagtaaagtgtggtacgtgtaccatattgcaagtattgtgtgaataag

SEQ ID NO: 8227 - DNA, 490 bp, unidentified
  misc_feature 1..490: note = Ascusbbf_256283, encodes 16S rRNA
  source 1..490: mol_type = genomic DNA
agagtttgatcatggctcaggatgaacgctggcggcgtgcctaacacatgcaagtcgaacgaagcgtcccgcccgaagaagaggagagcttgctcaaatcggactcaattgggacgacttagtggcggacgggtgagtaacgcgtgggtaacctgccgtgtgcagggggataacagttagaaatgactgctaataccgcataagcgcacagtatcgcatgatacagtgtgaaaagccgagacggcacacgatggacccgcgtctgattagccagttggcagggtaacggcctaccaaagcgacgatcagtagccggcctgagagggtgaacggccacattgggactgagacacggcccaaactcctacgggaggcagcagtgggggatattgcacaatgggggaaaccctgatgcagcgacgccgcgtgagtgaagaagtatttcggtatgtaaagctctatcagcagggaagaaaatgacggtacctga

SEQ ID NO: 8228 - DNA, 490 bp, unidentified
  misc_feature 1..490: note = Ascusbbf_725972, encodes 16S rRNA
  source 1..490: mol_type = genomic DNA
agagtttgatcatggctcaggatgaacgctagcggcaggcttaacacatgcaagtcgaggggtaacaggggtgcttgcactcgctgacgaccggcgcacgggtgcgtaacgcgtatgcaatctaccttttacagggggatagcccagagaaatttggattaatacctcatagtatatggacttggcatcgagtcgatattaaagatttatcggtaaaagatgagcatgcgttctattagctagatggtaaggtaacggcttaccatggcaacgatagataggggccctgagagggggatcccccacactggtactgagacacggaccagactcctacgggaggcagcagtgaggaatattggacaatgggcgagagcctgatccagccatgccgcgtgcaggaagactgccctatgggttgtaaactgcttttatacaggaagaaacactccctcgtgagggagcttgacggtactgtaagaataaggat

SEQ ID NO: 8229 - DNA, 490 bp, unidentified
  misc_feature 1..490: note = Ascusbbf_652708, encodes 16S rRNA
  source 1..490: mol_type = genomic DNA
agagtttgatcctggctcaggatgaacgctggcggcgtgcctaacacatgcaagtcgagcgggaaatacggaaatgaagcttcggtagattttctgtatggagagcggcggacgggtgagtaacgcgtaggcaacctaccccatacacagggatagccacgggaaactgtgattaaaacctgatgatgcgtcgaagtcacatgacattgacgtcaaagatttatcggtgtgggatgggcctgcgtctgattagctggttggtggggtaacggctcaccaaggcgacgatcagtagccgacctgagagggtaatcggccacattggaactgagacacggtccaaactcctacgggaggcagcagtggggaatattgcacaatgggcgaaagcctgatgcagcaacgccgcgtgagcgatgaaggcctttgggtcgtaaagctctgtccttggggaagaaacaaatgacggtacccttggaggaagccccgg

SEQ ID NO: 8230 - DNA, 490 bp, unidentified
  misc_feature 1..490: note = Ascusbbf_718637, encodes 16S rRNA
  source 1..490: mol_type = genomic DNA
agagtttgatcatggctcaggacgaacgctggcggcgtgcctaacacatgcaagtcgaacggagtgttgcgctgaaaggaaggtagcttgctaccggaatttcttgtaacacttagtggcggacgggtgagtaacgcgtgagcaacctgccttacagagggggacaacagttggaaacgactgctaataccgcataacataccgattgggcatccagacggtatcaaaggagcaatccgctgtaagatgggctcgcgtccgattagatagttggtgaggtaacggcccaccaagtctgcgatcggtagccggactgagaggttgatcggccacattgggactgagacacggcccagactcctacgggaggcagcagtgggggatattgcacaatgggggaaaccctgatgcagcaacgccgcgtgagggaagaaggttttcggattgtaaacctctgtttttagtgaagaaacaaatgacggtagctaaa

SEQ ID NO: 8231 - DNA, 490 bp, unidentified
  misc_feature 1..490: note = Ascusbbf_738348, encodes 16S rRNA
  source 1..490: mol_type = genomic DNA
agagtttgatcatggctcaggataaacgctagcggcaggcctaacacatgcaagtcgagcggcaacgggagtagcaatacttgccggcgagcggcggacgggtgagtaacgcgtatgcaacctgcccgcaacacggagatagccgaccgaaaggacgattaaactccgatggcatcagccccccgcatgagggactgattaaatatttataggttgcggatgggcatgcgtggcattagttagttggcggggcaacggcccaccaagacgatgatgcctatgggttctaaaaggaagatcccacacatcggtactgagacacggaccgaactcctacgggaggcagcagtgaggaatattggacaatgggggcaaccctgatccagccaaaccgcgtgggggaaggaggccgttaaggtcgtaaaccccttttatatgggagcaatccgcttcatgcatggagcgttgagagtaccatttgaataagcat

SEQ ID NO: 8232 - DNA, 490 bp, unidentified
  misc_feature 1..490: note = Ascusbbf_1787356, encodes 16S rRNA
  source 1..490: mol_type = genomic DNA
agagtttgatcatggctcaggacaaacgctggcggcgtgcctaacacatgcaagtcgaacgaagcacagaggatagagacttcggtcaatagagcctgtgacttagtggcggacgggtgagtaatgcatgagcaacctgccctggagagggggacaacagctggaaacggctgctaataccgcatgaagttgcgagggggcatccctttgcaaccaaagatttatcgctctgggatgggctcatgtctgattagtttgttggcggggcaacggcccaccaagactacgatcagtagccggactgagaggttgaacggccacattgggactgagatacggcccagactcctacgggaggcagcagtggggaatattgggcaatgggcgcaagcctgacccagcaacgccgcgtgaaggaagaaggctttcgggttgtaaacttcttttatcagggacgaagaacgtgacggtacctgatgaataagccacg

SEQ ID NO: 8233 - DNA, 490 bp, unidentified
  misc_feature 1..490: note = Ascusbbf_424019, encodes 16S rRNA
  source 1..490: mol_type = genomic DNA
agagtttgatcatggctcagaacgaacgctggcggcgcgttttaagcatgcaagtcgaacggcaagggtggagcttgctctacccctagagtggcggactggtgagtaacacgtgggtaatctaccttgaggatggggatagctgttagaaatagcagataataccgaataagcttgatatgttaaatcatgacaaggaaagggagctacggcttcgccttaagaagagcccgcggcccattagctagttggtgaggtaaaggcccaccaaggcgacgatgggtatccgacctgagagggtgatcggacacattgggactgagagacagcccagactcctacgggaggcagcagctaagaatcttccgcaatgggcgaaagcctgacggagcgacgccgcgtgtacgaagaaggccgaaaggttgtaaagtacttttgcatatgaagaataagcgatatagggaatgatattgtgatgacggtaatatgc

SEQ ID NO: 8234 - DNA, 490 bp, unidentified
  misc_feature 1..490: note = Ascusbbf_119194, encodes 16S rRNA
  source 1..490: mol_type = genomic DNA
agagtttgatcatggctcaggatgaacgctggcggcgtgcctaacacatgcaagtcgaacggagtacccgagacagcgacttcggtcaaagttttggaatacttagtggcggacgggtgagtaacacgtgagtaacctgcccttcagagggggataacataccgaaaggtatgctaataccgcatgaagtatataatccgcatggaatatatatcaaagatttatcgctgaaggatggactcgcgtctgattaggtagttggtgaggtaacggctcaccaagccgacgatcagtagccggactgagaggttgaacggccacattgggactgagacacggcccagactcctacgggaggcagcagtggggaatattgcgcaatgggggaaaccctgacgcagcgacgccgcgtgaaggaagaaggttttcggatcgtaaacttttgtcatcggggacgagtaaggacggtacccgaggaggaagccacggc

SEQ ID NO: 8235 - DNA, 490 bp, unidentified
  misc_feature 1..490: note = Ascusbbf_726946, encodes 16S rRNA
  source 1..490: mol_type = genomic DNA
agagtttgatcatggctcaggatgaacgctggcggcgtgcctaacacatgcaagtcgaacgaagctcttgaagcggagatttcggtcaaagctgatagatgactgagtggcggacgggtgagtaacgcgtgggcaacctgccccatactgggggatagcagttggaaacgactgataataccgcataagcgcacagtaaggcatcttacagtgtgaaaagatttattggtatgggatggacccgcgtctgattagctagttggtgaggtaacggcccaccaaggcgacgatcagtagccggactgagaggtcggacggccacattgggactgagagacggcccaaactcctacgggaggcagcagtgggggatattgcacaatgggggaaaccctgatgcagcgacgccgcgtgagtgaagaagtatttcggtatgtaaagctctatcgacagggaagaaagactccgtaaggagagatgacggtacctg

SEQ ID NO: 8236 - DNA, 490 bp, unidentified
  misc_feature 1..490: note = Ascusbbf_198116, encodes 16S rRNA
  source 1..490: mol_type = genomic DNA
agagtttgatcatggctcagagtgaacgctggcggcgtggttaagacatgcaagtcgagcgggatttttcattaagagtcttcggatgattaatgagaatgagagcggcaaacgggtgagtaacacgtaaataacttgccctctagtttgggatagctcgttgaaagacgaattaataccggatgtggttttctttcgtatggaagagatactaaagcttgtgatggcgctaggggagaggtttacggcctatcagcttgttggtaaggtaacggcttaccaaggcaaagacgggtagctggtctgagaggatgatcagccacattggaactgagacacggtccagacacctacgggtggcagcagtttcgaattattcacaatggacgaaagtctgatggtgcaacgccgcgtgggggatgaaggttttcgaattgtaaacccctgtcgctgaggagtaaaggttaggtttatagcctaatttgaatta

SEQ ID NO: 8237 - DNA, 490 bp, unidentified
  misc_feature 1..490: note = Ascusbbf_462587, encodes 16S rRNA
  source 1..490: mol_type = genomic DNA
agagtttgatcatggctcaggacgaacgctggcggcgtgcctaacacatgcaagtcgaacgaagcgccttgacgcaagacttcggtcaagctgatgggatgacttagtggcggacgggtgagtaacgcgtgaggaacctgcctttcagtgggggacaacagttagaaatgactgctaataccgcataatgcagcgaaaccgcatgattttgctgccaaagctttatgtgctgaaagatggcctcgcgtctgattagatagttggtggggtaacggcctaccaagtcgacgatcagtagccggattgagaggttgaacggccacattgggactgagatacggcccagactcctacgggaggcagcagtggggaatattgggcaatgggggaaaccctgacccagcaacgccgcgtgaaggaagaaggctttcgggttgtaaacttcttttaccagggacgaaggacgtgacggtacctggagaaaaagcca

SEQ ID NO: 8238 - DNA, 490 bp, unidentified
  misc_feature 1..490: note = Ascusbbf_1425415, encodes 16S rRNA
  source 1..490: mol_type = genomic DNA
agagtttgatcatggctcaggacgaacgctggcggcgtgcttaacacatgcaagtcgaacggtaaggccctttcgggggtacacgagtggcgaacgggtgagtaacacgtgagtaacctgcccacttcttcgggataacgctaggaaactggtgctaataccggatatgagctcctgccgcatggtgggggttggaaagtgtttgtggtggtggatggactcgcggcctatcagcttgttggtgaggtagtggctcaccaaggcggtgacgggtagccggcctgagagggtgaccggccacattgggactgagatacggcccagactcctacgggaggcggcagtggggaatattgcacaatgggcggaagcctgatgcagcaacgccgcgtgcgggatgacggccttcgggttgtaaaccgctttcaccaggggcgaaggcatccttttggggtgttgacggtacctggagaagaagcaccggctaact

SEQ ID NO: 8239 - DNA, 490 bp, unidentified
  misc_feature 1..490: note = Ascusbbf_716901, encodes 16S rRNA
  source 1..490: mol_type = genomic DNA
agagtttgatcctggctcagaatgaacgctggcggcatggattaggcatgcaagtcgaacgagaaagcccgcaagggcgagtaaagtggcgaaagggtgagtaacacgtgagcaacctgcccccgagaccggaacaagcctgggaaaccgggtctgagaccggatgcggaccgggaagacatcttccctcgtccaaacatttcatggctcggggatgggctcgcgccccattagcttgttggcggggtaacggcccaccaaggctacgacgggtaggtggtctgagaggatggtcacccacactgggactgagacactgcccagactcctacgggaggctgcagtcgagaatcttccgcaatgggcgcaagcctgacggagcgatgccgcgtgggggaagaaggccctcgggttgtaaacccctgtcgcgcgggacgaaaccagatgacggtaccgcgcaagaaagccacggctaactacgtgccagcag

SEQ ID NO: 8240 - DNA, 490 bp, unidentified
  misc_feature 1..490: note = Ascusbbf_1811336, encodes 16S rRNA
  source 1..490: mol_type = genomic DNA
agagtttgatcctggctcaggacgaacgctggcggcgtgcctaatacatgcaagtcgtacgcaccgaaggagagcttgctcttctgacgtgagtggcgaacgggtgagtaacacgtgggaaacctacccttcagcgggggataaccatcggaaacgatgactaataccgcatagacgatagaaccgcctggttcaatcgggaaagatggcttcggctatcactgaaggatggtcccgcgctgcattagctagttggtaaggtaacggcttaccaaggccatgatgcatagccgacctgagagggtgatcggccacattgggactgagacacggcccaaactcctacgggaggcagcagtagggaatcttccgcaatggacgcaagtctgacggagcaacgccgcgtgtgtgaagaaggttttcggatcgtaaagcactgttattagagaagaacaaccgatagagtaactgttatcggtctgacggtatc

SEQ ID NO: 8241 - DNA, 469 bp, unidentified
  misc_feature 1..469: note = Ascusbbf_284045, encodes 16S rRNA
  source 1..469: mol_type = genomic DNA
agagtttgatcctggctcagaacgaacgctggcggcaggcctaacacatgcaagtcgaacgagatcttcggatctagtggcgcacgggtgagtaacgcgtaggaatctacctgatagttcgggataacagttggaaacggctgctaataccggatacgccctttgggggaaagaatttcgctatcagatgagcctgcgtgacattagctagttggtagggtaatggcctaccaaggcgacgatgtctagctggtctgagaggatgatcagccacactgggactgagacacggcccagactcctacgggaggcagcagtggggaatattgggcaatgggcgcaagcctgacccagccatgccgcgtgagtgatgacggccttagggttgtaaagctctttcagtagtgacgatgatgacagtagctacagaagaagccccggctaacttcgtgccagcagccgcggtaat

SEQ ID NO: 8242 - DNA, 490 bp, unidentified
  misc_feature 1..490: note = Ascusbbf_714643, encodes 16S rRNA
  source 1..490: mol_type = genomic DNA
agagtttgatcctggctcagaacgaacgctggcggcgcgttttaagcatgcaagtcgaatggaagttattcttcgggataatggacatggcggactggtgagtaacacgtagataatctacccttgagttggggataccccatggaaacatgggataataccgaatgaagtctaactatcacaagatggaatgatgaaagaggcgattgcctcgcttaaggatgagtctgcggctcattagctagttggtggggtaacggcctaccaaggcgatgatgagtagccggcctgagagggtgaacggccacattgggactgagatacggcccaaactcctacgggaggcagcagctaagaatcttccgcaatggacgaaagtctgacggagcgacgccgcgtgcacgaagaaggcagagatgttgtaaagtgcttttattggggaagaataagggtagcaggaaatggctgcctgatgacaataaccagtgaa

SEQ ID NO: 8243 - DNA, 490 bp, unidentified
  misc_feature 1..490: note = Ascusbbf_984378, encodes 16S rRNA
  source 1..490: mol_type = genomic DNA
agagtttgatcatggctcaggatgaacgctggcggcgtgcttaacacatgcaagtcgaacgaagcatttgtacctgatcttttcggagtgaagggacttatgacttagtggcggacgggtgagtaacgcgtgggcaacctgccgtatgcagggggacaacagttggaaacgactgctaataccgcataagcgcacactgtcacatggcagagtgtgaaaagaattatcggcatacgatgggcccgcgttggattaggtagttggtgaggtaacggcccaccaagccgacgatccatagccgacctgagagggtgaccggccacattgggactgagacatggcccaaactcctacgggaggcagcagtggggaatattgcacaatgggggaaaccctgatgcagcgacgccgcgtgagtgaagaagtatttcggtatgtaaagctctatcagcagggaagaaaatgacggtacctgcacaagaagccccgg

SEQ ID NO: 8244 - DNA, 490 bp, unidentified
  misc_feature 1..490: note = Ascusbbf_352660, encodes 16S rRNA
  source 1..490: mol_type = genomic DNA
agagtttgatcctggctcagattgaacgctggcggcaggcctaacacatgcaagtcgagcggcagcgggaagtagcttgctactttgccggcgagcggcggacgggtgagtaacgcgtgggaatctacccatttgtgggggataacttggggaaacccaagctaataccgcataatccctacgggggaaagcaggggctcttcggaccttgcgcagatggatgagcccgcgtcggattagctagttggtagggtaaaggcctaccaaggcgacgatccgtaactggtctgagaggatgaccagtcacatcgggactgagacacggcccgaactcctacgggaggcagcagtggggaatcttggacaatgggggcaaccctgatccagccatgccgcgtgtgtgaagaaggccctagggttgtaaagcactttcagtagggaggaaggcttcgggttaataccctggagtacttgacgttacctacagaag

SEQ ID NO: 8245 - DNA, 490 bp, unidentified
  misc_feature 1..490: note = Ascusbbf_263872, encodes 16S rRNA
  source 1..490: mol_type = genomic DNA
agagtttgatcatggctcaggacgaacgctggcggcgtgcctaacacatgcaagtcgaacgggacttaccggaacgagacttcggtcaagtgaaagtgagtttagtggcggacgggtgagtaacgcgtgagcaacctgcctttcggagggggacaacagctggaaacggctgctaataccgcataatattaccagtaggcatctacaggtaatcaaagatttatcgccgaaagatgggctcgcgtctgattagatagttggtggggtaacggcccaccaagtcaacgatcagtagccggactgagaggttgaacggccacattgggactgagatacggcccagactcctacgggaggcagcagtggggaatattgggcaatgggggcaaccctgacccagcaacgccgcgtgaaggaagaaggctttcgggttgtaaacttctttgacgagggacgaagtaagtgacggtacctcgaaaacaagccacgg

SEQ ID NO: 8246 - DNA, 490 bp, unidentified
  misc_feature 1..490: note = Ascusbbf_483723, encodes 16S rRNA
  source 1..490: mol_type = genomic DNA
agagtttgatcatggctcaggatgaacgctggcggcgtgcctaacacatgcaagtcgagcgagaagcccatgatcgatacttcggttgattgattgggtggaaagcggcggacgggtgagtaacgcgtaggcaacctgccccctgcagagggatagcctcgggaaaccgggattaaaacctcataacgcagactgcagacatctgcggtctgccaaagatttatcggcaggggatgggcctgcgtctgattagttagttggtggggtaacggcctaccaaggcgacgatcagtagccgacctgagagggtgatcggccacattggaactgagacacggtccaaactcctacgggaggcagcagtggggaatattgcacaatgggcgaaagcctgatgcagcaacgccgcgtgaaggatgaaggcccttgggtcgtaaacttctgttctaagggaagataatgacggtaccttaggagcaagtcccggcta

SEQ ID NO: 8247 - DNA, 490 bp, unidentified
  misc_feature 1..490: note = Ascusbbf_737873, encodes 16S rRNA
  source 1..490: mol_type = genomic DNA
agagtttgatcatggctcaggacgaacgctggcggcgcgcctaacacatgcaagtcgaacggacgagaggagcttgctcctcaagttagtggcggacgggtgagtaacacgtgagcaacctgcctttcagagggggacaacagttggaaacgactgctaataccgcataacgtggcttgggggcatccccgggctaccaaagatttatcgctgaaagatgggctcgcgtctgattagatagttggtgaggtaacggcccaccaagtcgacgatcagtagccggactgagaggttgaacggccacattgggactgagacacggcccagactcctacgggaggcagcagtgggggatattggacaatgggggcaaccctgatccagcgacgccgcgtgagggaagaaggttttcggattgtaaacctctgttgacagggaagaaaatgacagtacctgttcagaaagccacggctaactacgtgccagcagc

SEQ ID NO: 8248 - DNA, 490 bp, unidentified
  misc_feature 1..490: note = Ascusbbf_1357384, encodes 16S rRNA
  source 1..490: mol_type = genomic DNA
agagtttgatcatggctcaggacgaacgctggcggcgtgcctaacacatgcaagtcgagcggactgataatgaaagcttgctggatttatcagttagcggcggacgggtgagtaacgcgtgagcaacctgtcctctacagggggataagatctcgaaagggattctaataccgcatgagaccacagtgggacatcccacaggggtcaaaggagcaatccggtagagggtgggctcgcgtccgattagatagttggtgaggtaacggcccaccaagtcgacgatcggtagccgacctaagagggtgatcggccacattgggactgagacacggcccagactcctacgggaggcagcagtggggaatattgggcaatgggggaaaccctgacccagcaacgccgcgtggaggaagaaggtcttcggatcgtaaactcctgtcctaagggaagaggagaagactgtaccttaggaggaagccccggctaacta

SEQ ID NO: 8249 - DNA, 490 bp, unidentified
  misc_feature 1..490: note = Ascusbbf_363802, encodes 16S rRNA
  source 1..490: mol_type = genomic DNA
agagtttgatcctggctcaggatgaacgctggcggcgtgcctaacacatgcaagtcgagcggagttatgagaggtgcttgcaccacttttaacttagcggcggacgggtgagtaacacgtgagtaacctgccctcgagtggggaacaacatcgagaaatcggtgctaataccgcataacatctctttaccgcatgatagagagatcaaaggatttattcgcttgaggatggactcgcgtccgattagttagttggtgaggtaacggcccaccaagacatcgatcggtagccgaactgagaggttgatcggccacattgggactgagacacggcccagactcctacgggaggcagcagtggggaatattgggcaatgggcgaaagcctgacccagcaacgccgcgtgaaggatgaaggtcttcggattgtaaacttctttgatcagggacgaaacaaatgacggtacctgaagaacaagccacggctaact

SEQ ID NO: 8250 - DNA, 490 bp, unidentified
  misc_feature 1..490: note = Ascusbbf_456707, encodes 16S rRNA
  source 1..490: mol_type = genomic DNA
agagtttgatcctggctcaggatgaacgctggcggcgtgcttaacacatgcaagtcgaacggaacttttctcccgacaaagcggagagcttgctcgaagtagagtcaattgaaaagtttagtggcggacgggtgagtaacgcgtgggtaacctgccatatacagggggataacacttagaaataggtgctaataccgcataagcctacagaatcgcatgattcagtaagaaaaactccggtggtatatgatggacccgcgtctgattagctagttggtgaggtagtggctcaccaaggcgacgatcagtagccggcctgagagggtgaacggccacattgggactgagacacggcccaaactcctacgggaggcagcagtggggaatattgcacaatgggggaaaccctgatgcagcgacgccgcgtgagtgaagaagtatttcggtatgtaaagctctatcagcagggaagaaaatgacggtacctgac

SEQ ID NO: 8251 - DNA, 490 bp, unidentified
  misc_feature 1..490: note = Ascusbbf_1360754, encodes 16S rRNA
  source 1..490: mol_type = genomic DNA
agagtttgatcatggctcaggatgaacgctggcggcgtgcttaacacatgcaagtcgaacgaatttctgacagaatgcggcttcggccaagtgaagacagaagtgagtggcggacgggtgagtaacgcgtgggtaacctaccttacacagggggataacgattggaaacgatcgctaataccgcataagaccacagtgccgcatggtacaggggtaaaagatttatcggtgtaagatggacccgcgtctgattaggcagttggcgaggtaacggctcaccaaacctacgatcagtagccgacctgagagggtgatcggccacattgggactgagacacggcccaaactcctacgggaggcagcagtggggaatattgcacaatgggggaaaccctgatgcagcgacgccgcgtgagtgaagaagtatttcggtatgtaaagctctatcagcagggaagataatgacggtacctgactaagaagcaccggc

SEQ ID NO: 8252 - DNA, 490 bp, unidentified
  misc_feature 1..490: note = Ascusbbf_259136, encodes 16S rRNA
  source 1..490: mol_type = genomic DNA
agagtttgatcatggctcaggatgaacgctggcggcgtgcataacacattcaagtcgaacggacggaagggagcttgctccctgaagttagtggcggacgggtgagtaacgcgtgagcaacctgcctttgcgagcgggataacgacgggaaactgtcgctaataccgcatgacacagcgactccgcatggagatgctgtcaaagattttatcgcgcaaagatgggctcgcgtctgattagatagttggcagggtaacggcctaccaagtctgcgatcagtagccggactgagaggttgaacggccacattggaactgagaaacggtccagactcctacgggaggcagcagtggggaatattgggcaatgggcgcaagcctgacccagcgacgccgcgtgagggaagaaggtcttcggattgtaaacctttgttgacagggacgaagaagatgacggtacctgtcgaggaagccacggctaactacgtgcc

SEQ ID NO: 8253 - DNA, 490 bp, unidentified
  misc_feature 1..490: note = Ascusbbf_404957, encodes 16S rRNA
  source 1..490: mol_type = genomic DNA
agagtttgatcatggctcaggacgaacgctggcggcgtgcctaacacatgcaagtcgaacggggaccaagagagcttgctctctgaagtcctagtggcgaacgggtgagtaacacgtgagcaacctgtcccagactcggggataaccaagggaaaccttggctaataccggataccctcttcgggccgcatggcccgatgcggaaagtttttcggtctgggaggggctcgcggcctatcagcttgttggcggggtaacggcccaccaaggctacgacgggtagctggtttgagagaacgatcagccacactggaactgagacacggtccagactcctacgggaggcagcagtggggaatcttgcgcaatgggcgaaagcctgacgcagcaacgccgcgtgcgggaggaaggccttcgggttgtaaaccgctttcagcagggacgaaaatgacggtacctgcagaagaagccccggctaactacgtgccag

SEQ ID NO: 8254 - DNA, 490 bp, unidentified
  misc_feature 1..490: note = Ascusbbf_1566566, encodes 16S rRNA
  source 1..490: mol_type = genomic DNA
agagtttgatcatggctcaggacgaacgctggcggcgcgcctaacacatgcaagtcgaacggagatacgctgatagaagcttcggcagaaagaatcgtatcttagtggcgaacgggtgagtaacgcgtgagtaacctgccttcgagagggggacaacagttggaaacgactgctaataccgcatgagcccacactatcgcatgatagagtgagaaaaggagagatccgcttgaagatggactcgcgtctgattagccagttggtgaggtaacggctcaccaaagcgacgatcagtagccggactgagaggttgatcggccacattgggactgagacacggcccagactcctacgggaggcagcagtggggaatattgcacaatggggggaaccctgatgcagcgacgccgcgtggaggaagaaggtattcgtattgtaaactcctgtcgtgtgggacgaagatgacggtaccacacaagaaagcaccggc

SEQ ID NO: 8255 - DNA, 490 bp, unidentified
  misc_feature 1..490: note = Ascusbbf_742548, encodes 16S rRNA
  source 1..490: mol_type = genomic DNA
agagtttgatcatggctcaggatgaacgctggcggcgtgcataacacattcaagtcgaacggacgacggggagcttgctccccgaagttagtggcggacgggtgagtaacgcgtgagcaacctgccttgcaaagcgggacaacattgggaaaccggtgctaataccgcatgacatacaagtttcgcatgggacatgtatcaaagattaatcgatgcaagatgggctcgcgtccgattagatagttggtgaggtaacggctcaccaagtcgacgatcggtagccggactgagaggttgaacggccacattggaactgagaaacggtccagactcctacgggaggcagcagtggggaatattgggcaatgggcgaaagcctgacccagcgacgccgcgtgaaggaagaaggtcttcggattgtaaacttttgtcgacagggaagataatgacggtacctgtcaaggaagccacggctaactacgtgccagca

SEQ ID NO: 8256 - DNA, 490 bp, unidentified
  misc_feature 1..490: note = Ascusbbf_156025, encodes 16S rRNA
  source 1..490: mol_type = genomic DNA
agagtttgatcatggctcagagttaacgctggcggcgtgcctaacacatgcaagtcgagcgagtgcttgtaaagactagcggcaaacgggtgagtaacacatgggaaaccttccttagaatggggaatatctccgtgaaaacggagctaataccgcataagaccacagtttggcatcgaacaggggtaaaagcagcgatgtgttctaagatggtcctgtgtcctatcagctagttggtggggtagaggcctaccaaggcgaagacgggtatccggcctgaaagggtgaacggacacactggaactgagacacggtccagactcctacgggaggcagcagtggggaattttggacaatgggggaaaccctgatccagcgacgccgcgtggaggatgaaggttttaggattgtaaactccttttggaggggaagaaaaaaatgacggtaccctcagaaaaagccacggctaacttcgtgccagcagccgcgg

SEQ ID NO: 8257 - DNA, 490 bp, unidentified
  misc_feature 1..490: note = Ascusbbf_1875386, encodes 16S rRNA
  source 1..490: mol_type = genomic DNA
agagtttgatcatggctcaggatgaacgctggcggcgtgcctaacacatgcaagtcgagcgggaaggcctcaactgaaacttcggtcgaatgcgaggctggatagcggcggacgggtgagtaacgcgtaggtaacctgccccatacagaggaatagcctagggaaacctggattaatgcctcataatgcgagacggccacatggccgattcgccaaagatttatcggtatgggatggacctgcgtctgattagctagttggtgaggtaacggcccaccaaggcaacgatcagtagccgacctgagagggtgatcggccacattggaacagagacacggtccaaactcctacgggaggcagcagtgggggatattgcacaatggagggaactctgatgcagcaacgccgcgtgagcgatgaaggtcttcggatcgtaaagctctgtccttagggacgaagaaagtgacggtacctaaggaggaagccccgg

SEQ ID NO: 8258 - DNA, 490 bp, unidentified
  misc_feature 1..490: note = Ascusbbf_1838940, encodes 16S rRNA
  source 1..490: mol_type = genomic DNA
agagtttgatcctggctcaggatgaacgctagctacaggcctaacacatgcaagtcgaggggcagcagatcgaaagcttgcttttgatgctggcgaccggcgaatgggtgagtcacgcgtgtccaacctgccttcagcccggggatagcccttggaaatgaggattaagacccgatacgtgcccgttccgcatggcgcgggcatgaaactggactgaagatggggacgcgtcggattagcttgacggcggggcaatggcccaccgtggcgacgatccgcaggggttctgagaggaaggtcccccacactggcactgagacacgggccagactcctacgggaggcagcagtgaggaatattggtcaatggccgagaggctgaaccagccaagtagcgtgcaggatgacggccctacgggttgtaaactgcttttgcgggaggataaacggcactacgtgtagtgccttgcaggtatcccgtgaataaggac

SEQ ID NO: 8259 - DNA, 490 bp, unidentified
  misc_feature 1..490: note = Ascusbbf_1732768, encodes 16S rRNA
  source 1..490: mol_type = genomic DNA
agagtttgatcatggctcaggacgaacgctggcggcgtgcttaacacatgcaagtcgaacgaggtccatggagcttgctccggaagacctagtggcgaacgggtgcgtaacacgtgagaaacctgccctggacttgggaataacagtcggaaacgactgctaataccgaataccttcacaccatcgcatggtgaagtgaagaaagcttttgcggttcaggagggtctcgcggcctatcagcttgttggtgaggtaacggctcaccaaggcatcgacgggtagctggtctgagaggatgatcagccacactgggactgagacacggcccagactcctacgggaggcagcagtggggaatattgcacaatgggcgaaagcctgatgcagcaacgccgcgtgcgggaagaaggccctagggttgtaaaccgctttcagcagggaagaaaatgacggtacctgcagaagaaggtgcggccaactacgtgccagc

SEQ ID NO: 8260 - DNA, 490 bp, unidentified
  misc_feature 1..490: note = Ascusbbf_906056, encodes 16S rRNA
  source 1..490: mol_type = genomic DNA
agagtttgatcatggctcaggatgaacgctggcggcgtgcttaatacatgcaagtcgaacgaggtactgcgaatgaaattttcggatggattttgcaataccgagtggcggacaggtgagtaacgcgtgggtaacctgccttacacagggggacaacagagagaaatttctgctaataccgcataacccgcttgggccgcatggccctgacggaaaagatttatcggtgtaagatggacccgcgtctgattagccagttggtggggtaacggcctaccaaagcgacgatcagtagccgaactgagaggttgaccggccacattgggactgagacacggcccagactcctacgggaggcagcagtagggaatattgcacaatggggggaaccctgatgcagcaacgccgcgtgagtgaagaagtatttcggtatgtaaagctctatcagcagggaagagaatgacggtacctgcataagaagccccggcta

SEQ ID NO: 8261 - DNA, 490 bp, unidentified
  misc_feature 1..490: note = Ascusbbf_742003, encodes 16S rRNA
  source 1..490: mol_type = genomic DNA
agagtttgatcatggctcaggacgaacgctggcggcgtgcttaacacatgcaagtggtgcgacgaaccagggcttgccctggggcaaagccgcgaacgggtgagtaacacgtgagtaacctgccccgatgaccgggacaacccgaggaaactcgggctaataccggatgtggcgtgcggatgtaagtccgcccgctaaaggaagcttcggcctccgcattgggaggggctcgcggcccattagtttgttggtggggtaacggcctaccaagacttcgatgggtagctggtctgagaggacgatcagccacactgggactgagacacggcccagactcctacgggaggcagcagtggggaatcttgcgcaatgcgcgaaagcgtgacgcagcaacgccgcgtgggggaagacggctttcgggttgtaaacccctttcaggagggacgaaggttcgccggtgaatagccgtgcggattgacggtaccttcag

SEQ ID NO: 8262 - DNA, 490 bp, unidentified
  misc_feature 1..490: note = Ascusbbf_1793296, encodes 16S rRNA
  source 1..490: mol_type = genomic DNA
agagtttgatcatggctcaggacgaacgctggcggcgtgcctaacacatgcaagtcgagcgggatccatccagtggcaacactggggaagatctagcggcgaacgggtgagtaacacgtgagaaacttgccccggagtacgggataacccgaggaaactcgagctaataccgtatgccctcttctgatcgcatggtcggatgaggaaagatttatcgctccgggagagtctcgcggcctatcagctagttggtggggtaatggcccaccaaggcatcgacgggtagctggtctgagaggacgatcagccacactgggactgagacacggcccagactcctacgggaggcagcagtggggaatcttgcgcaatgggcgaaagcctgacgcagcaacgccgcgtgcgggatgaaggccttcgggttgtaaaccgctttcagcagggaagaaattgacggtacctgcagaagaagccccggccaactacgtgc

SEQ ID NO: 8263 - DNA, 490 bp, unidentified
  misc_feature 1..490: note = Ascusbbf_442189, encodes 16S rRNA
  source 1..490: mol_type = genomic DNA
agagtttgatcatggctcaggacgaacgctggcggcgtgcttaacacatgcaagtcgagcgaggaccgcaccttcgggtgtggagccgagcggcgaacgggtgagtaacacgtgagcaacctacccctggcaccgggatagccccgggaaactgggattaataccggatacgaccacttcccgcatgggatggtggtggaaaggttcccccttgtggggttccggccagggatgggctcgcggcccatcagctagttggcggggtaacggcccaccaaggcgatgacgggtagccggcctgagagggcggtcggccacactgggactgagacacggcccagactcctacgggaggcagcagtggggaatattgcgcaatgggcggaagcctgacgcagcgacgccgcgtgggggatgaaggccttcgggttgtaaacctctttcagcagggacgaagttgacgtgtacctgcagaagaagcgccggccaa

SEQ ID NO: 8264 - DNA, 490 bp, unidentified
  misc_feature 1..490: note = Ascusbbf_481281, encodes 16S rRNA
  source 1..490: mol_type = genomic DNA
agagtttgattatggctcagattgaacgctggcggcgtgcctaacacatgcaagtcgagcgatgatcggggaatgagaccttcgggtggatttccctgagattagcggcggatgggtgagtaacgcgtgggcaatctgccctccacagggggataacacagggaaacttgtgctaataccgcacaacatctcggggaggcatctctctgagatcaaaggagcgatccggtgaaggaggagcccgcgtctgattagttggttggtgaggtaacggcccaccaaggcgacgatcagtagccgaactgagaggttgatcggccacattgggactgagacacggcccagactcctacgggaggcagcagtggggaatattgcacaatggaggaaactctgatgcagcaacgccgcgtgaaggatgacggccttcgggttgtaaacttctttggcaggggacgaagacagtgacggtaccctgagaacaagccac

SEQ ID NO: 8265 - DNA, 490 bp, unidentified
  misc_feature 1..490: note = Ascusbbf_723132, encodes 16S rRNA
  source 1..490: mol_type = genomic DNA
agagtttgatcctggctcaggatgaacgctggcggcgtgcctaacacatgcaagtcgaacgaagctcttgatgcggagatttcggtcaaagcggatagatgactgagtggcggacgggtgagtaacgcgtgggcaacctgcccttatctgggggatagcagttggaaacgactgataataccgcataagcgcacagtgaggcatctcacggtgtgaaaagatttatcggataaggatggacccgcgtctgattagctagttggtgaggtaacggcccaccaaggcgacgatcagtagccggactgagaggtcggacggccacattgggactgagagacggcccaaactcctacgggaggcagcagtgggggatattgcacaatggggggaaccctgatgcagcgacgccgcgtgagtgaagaagtatttcggtatgtaaagctctatcgacagggaagaaagactccgtaaggagagatgacggtacctg

SEQ ID NO: 8266 - DNA, 490 bp, unidentified
  misc_feature 1..490: note = Ascusbbf_1090356, encodes 16S rRNA
  source 1..490: mol_type = genomic DNA
agagtttgatcatggctcagaatgaacgctggcggcgcgtcttaagcatgcaagtcggacggcaggctgccttcgggcagccgagagtggcgaacgggtgagtaacacgtaagtgatctgccctgcagttggggatagcctgtggaaacacagggtaataccggatgagatgtcaatgattgaactatgacatgaaagtggccacggccacgctgcaggatgagcttgcggctcattagctagttgggggtgtaacggaccaccaaggcgacgatgagtagccggcctgagagggtgaacggccacattgggactgagacacggcccagactcctacgggaggcagcagctaagaatattccgcaatggggggaaccctgacggagcgacgccgcgtgaacgatgaaggcagagatgtcgtaaagttcttttatcactgaagaataaggggggcagggaatggccctccgatgacgttaggtgatgaata

SEQ ID NO: 8267 - DNA, 490 bp, unidentified
  misc_feature 1..490: note = Ascusbbf_1401712, encodes 16S rRNA
  source 1..490: mol_type = genomic DNA
agagtttgtcctggctcaggatgaacgctggtggcgtgcttaacacatgcaagtcgaacgattaaaccggcttcggccggatatagagtggcgaacgggtgagtaacacgtgaccaacctaccccatactccgggataactcagggaaacttgtgctaataccggatactccgagaggatcgcatgttcttttcgggaaagcctttacggtatgggatggggtcgcggcccattaggtagacggcggggtaacggcccaccgtgccgatgatgggtagccgagctgagaggctgatcggccacattgggactgagatacggcccagactcctacgggaggcagcagtggggaattttgcgcaatgggggaaaccctgacgcagcaacgccgcgtgcgggatgacggccttcgggttgtaaaccgctttcagtggggacgattatgacggtacccacagaagaagctccggctaaatacgtgccagcagcc

SEQ ID NO: 8268 - DNA, 490 bp, unidentified
  misc_feature 1..490: note = Ascusbbf_356490, encodes 16S rRNA
  source 1..490: mol_type = genomic DNA
agagtttgatcatggctcaggatgaacgctggcggcgtgcctaacacatgcaagtcgagcgggaaatattgaaatgaaacttcggtagattttcgatatggagagcggcggacgggtgagtaacgcgtaggcaacctgcccctggcagagggatagccactggaaacggtgattaaaacctcataacgcgtaacggttgcataaccgatacgccaaagatttatcggcaagggatgggcctgcgtctgattagctggttggtgaggtaacggctcaccaaggcgacgatcagtagccgacctgagagggcaatcggccacattggaactgagacacggtccaaactcctacgggaggcagcagtggggaatattgcacaatgggggaaaccctgatgcagcaacgccgcgtgaaggaagaaggcctttgggtcgtaaacttctgtccttggggacgaataaagtgacggtacccttggaggaagccccgg

SEQ ID NO: 8269 - DNA, 490 bp, unidentified
  misc_feature 1..490: note = Ascusbbf_1758977, encodes 16S rRNA
  source 1..490: mol_type = genomic DNA
agagtttgatcatggctcaggatgaacgctggcggcgtgcataacacattcaagtcgaacgagcgagtgcccttcgggacatgagctagtggcggacgggtgagtaacgcgtgagcaacctgcccctgtgtgcgggataacgtcgggaaactgacgctaataccgcataacacatgagccccgcatggggcatatgtcaaagatttattgcacagggatgggctcgcgtctgattagatagttggcagggtaacggcctaccaagtctgcgatcagtagccggactgagaggttgaacggccacattggaactgggatacggtccagactcctacgggaggcagcagtggggaatattgggcaatgggcgaaagcctgacccagcgacgccgcgtgaatgaagaagatcttcgggttgtaaagttcttttatatgggacaaaacaaatgacggtaccatatgaataagccacggctaactacgtgccagc

SEQ ID NO: 8270 - DNA, 490 bp, unidentified
  misc_feature 1..490: note = Ascusbbf_304737, encodes 16S rRNA
  source 1..490: mol_type = genomic DNA
agagtttgatcctggctcaggacgaacgctggcggcgtgcctaacacatgcaagtcgaacgagaatcacggaccggaagcttcggtggaaggactgtgaggaaagtggcggacgggtgagtaacgcgtgagcaacctgcccttcggagggggacaacagttggaaacgactgctaataccgcatgacatacacgggaggcatctcttgtgtatcaaagatttatcgccgagggatgggctcgcgtctgattagatagttggtagggtaacggcctaccaagtcgacgatcagtagccggactgagaggttgaacggccacattgggactgagatacggcccagactcctacgggaggcagcagtggggaatattgggcaatgggggcaaccctgacccagcaacgccgcgtgaaggaagaaggctttcgggttgtaaacttctttgaccggggacgataatgacggtacccggaaaacaagccacggcta

SEQ ID NO: 8271 - DNA, 490 bp, unidentified
  misc_feature 1..490: note = Ascusbbf_736468, encodes 16S rRNA
  source 1..490: mol_type = genomic DNA
agagtttgatcatggctcaggacgaacgctggcggcgtgcctaacacatgcaagtcgaacggagatcaggagcttgcttctgatcttagtggcggacgggtgagtaacgcgtgagtaacctgccttgcagagggggatagccattggaaacgatggataataccgcataacgtatgctggtcgcatggtcggcataccaaaggagcaatccgctgcaagatggactcgcgtccgattagatagttggtgaggtaacggcccaccaagtcgacgatcggtagccggactgagaggttgaacggccacattgggactgagacacggcccagactcctacgggaggcagcagtgagggatattgcacaatgggcgaaagcctgatgcagcaacgccgcgtgagggatgacggttttcggattgtaaacctctgtcttcggtgaagatcatgacattagccgaggaggaagccacggctaactacgtgccagca

SEQ ID NO: 8272 - DNA, 490 bp, unidentified
  misc_feature 1..490: note = Ascusbbf_1822539, encodes 16S rRNA
  source 1..490: mol_type = genomic DNA
agagtttgatcatggctcaggataaacgctggcggcgtgcttaacacatgcaagtcgaacggagtagtcctcccgtgactgaagaagcttgcttccgaggaaacaattggactacttagtggcggacgggtgagtaacgcgtgggtaacctgcctcacactgggggatagcagttggaaacgactgataataccgcataagcgcacagcatcgcatgatgcagtgtgaaaaactccggtggtgtgagatggacccgcgtctgattagctagttggcgaggtaacggcccaccaaggcgacgatcagtagccggcctgagagggtgtacggccacattgggactgagacacggcccaaactcctacgggaggcagcagtggggaatattggacaatgggggaaaccctgatccagcgacgccgcgtgagcgatgaagtatttcggtatgtaaagctctatcagcagggaagataatgacggtacctgacta

SEQ ID NO: 8273 - DNA, 490 bp, unidentified
  misc_feature 1..490: note = Ascusbbf_742825, encodes 16S rRNA
  source 1..490: mol_type = genomic DNA
agagtttatcctggctcaggatgaacgctggcggcgtgcttaacacatgcaagtcgaacggagatagcgagaagcttgcttctttctatcttagtggcggacgggtgagtaacgcgtgggcaacctaccctgtacagggggatagcagctggaaacggctgataaaaccgcataaaacggcagtaccgcatggtacaaccgtcaaatattcataggtacaggatgggcccgcgtctgattagccagttggtggggtaacggcctaccaaagcgacgatcagtagccggcctgagagggtgaacggccacattgggactgagacacggcccaaactcctacgggaggcagcagtggggaatattggacaatgggggaaaccctgatccagcgacgccgcgtgagtgaagaagtatctcggtatgtaaagctctatcagcagggaagatgatgacggtacctgactaagaagcaccggctaacttcgtgcca

SEQ ID NO: 8274 - DNA, 490 bp, unidentified
  misc_feature 1..490: note = Ascusbbf_335690, encodes 16S rRNA
  source 1..490: mol_type = genomic DNA
agagtttgatcctggctcaggatgaacgctggcggcgtgcttaacacatgcaagtcgaacgagaaagcaacttcggttgtgagtagagtggcgaacgggtgagtaacacgtgagcaacctgcccttcacttcgggataactcagggaaacttgtgctaataccgaatactccgattagatcgcatggtcttttcgggaaagcttttacggtgaaggatgggctcgcggcccattaggtagttggtagggtaacggcctaccaagccgacgatgggtagccgggttgagagaccgaccggccacattgggactgagacacggcccagactcctacgggaggcagcagtggggaattttgcgcaatgggcgaaagcctgacgcagcaacgccgcgtgcgggatgaaggccttcgggttgtaaaccgctttcagtagggaagaaattgacggtacctacagaagaagctccggctaactacgtgccagcagcc

SEQ ID NO: 8275 - DNA, 490 bp, unidentified
  misc_feature 1..490: note = Ascusbbf_1692725, encodes 16S rRNA
  source 1..490: mol_type = genomic DNA
agagtttgatcctggctcaggacgaacgctggcggcgcgcctaacacatgcaaatcgagcgatgaagacataaccgacgccttcgggaagaagttgagttggattagcggcggacgggtgagtaacacgtgagtaacctgcctttgacacggggatagccaccggaaacggtgattaatacccgatgaaatcgtaatgacacatgtcataacgatcaaagtgaattagcggtcaaagatggactcgcgtctgattaattagttggtgaggtaacggctcaccaagatagcgatcagtagccggcctgagagggtgaacggccacattggaactgagaaacggtccaaactcctacgggaggcagcagtggggaatattgcacaatgggggaaaccctgatgcagcgacgccgcgtgagcgaagaaggatttcgattcgtaaagctctgtcctatgggaagataatgacggtaccataggaggaagccccg

SEQ ID NO: 8276 - DNA, 490 bp, unidentified
  misc_feature 1..490: note = Ascusbbf_1357145, encodes 16S rRNA
  source 1..490: mol_type = genomic DNA
agagtttgatcatggctcaggatgaacgctggcggcgtgcataacacattcaagtcgaacgatgaacggacttcggtccgggattagtggcggacgggtgagtaacgcgtgagcaacctgccccggagtgagggataacagacggaaacatctgctaatacctcatatagcatcgggttcgcatgtacctggtatgaaaggtttactgctccgggatgggctcgcgtctgattagatagttggtgaggtaacggcccaccaagtctgcgatcagtagccggactgagaggttgaacggccacattggaactgagatacggtccagactcctacgggaggcagcagtggggaatattgggcaatgggcgaaagcctgacccagcgacgccgcgtgaaggaagaaggtcttcggattgtaaacttctgttaactagggacgaaacaaatgacggtacctagagagaaagccacggctaactacgtgccagca

SEQ ID NO: 8277 - DNA, 490 bp, unidentified
  misc_feature 1..490: note = Ascusbbf_1296671, encodes 16S rRNA
  source 1..490: mol_type = genomic DNA
agagtttgatcctggctcaggacgaacgctggcggcgtgcctaacacatgcaagtcgaacgaagctccgtgaagcaagacttcggtcaagcggaacggatgactgagtggcggacgggtgagtaacgcgtgaggaacctgcctttcagtgggggacaacagttggaaacgactgctaataccgcatgaagtacgttgggggcatccccgatgtaccaaagatttattgctgaaagatggcctcgcgtctgattagatagttggtgaggtaacggcccaccaagtcgacgatcagtagccggactgagaggttgaacggccacattgggactgagatacggcccagactcctacgggaggcagcagtggggaatattgggcaatgggggaaaccctgacccagcaacgccgcgtgaaggaagaaggctttcgggttgtaaacttcttttaccagggacgaaggacgtgacggtacctggagaaaaagccac

SEQ ID NO: 8278 - DNA, 490 bp, unidentified
  misc_feature 1..490: note = Ascusbbf_1501531, encodes 16S rRNA
  source 1..490: mol_type = genomic DNA
agagtttgatcatggctcaggacgaacgctggcggcgtgcctaacacatgcaagtcgaacgagaatttagtaattgatttcttcggaatgattttactaaaggaaagtggcggacgggcgagtaacgcgtgagtaacctgcccataagagggggataatccttggaaacggggactaataccgcatattgtagctttaccgcatggtttagttatgaaagatttatcgcttatggatggactcgcgtaagattagatagttggtgaggtaacggctcaccaagtcgacgatctttagccgaactgagaggttgatcggccgcattgggactgagacacggcccagactcctacgggaggcagcagtggggaatattgcgcaatgggggcaaccctgacgcagcaacgccgcgtgcaggaagacggtcttcggattgtaaactgttgtcgcaagggaagaagaaaatgacggtaccttgtgagaaagtcac

SEQ ID NO: 8279 - DNA, 490 bp, unidentified
  misc_feature 1..490: note = Ascusbbf_530869, encodes 16S rRNA
  source 1..490: mol_type = genomic DNA
agagtttgatcctggctcagaacgaacgctggcggcgcgtcttaagcatgcaagtcgagcgggattgggggcttgcccccatgagagcggcggactggcgaggagcgcgtgggcgacgcgccccccggactggaacagcccgtggaaacacggggtaatgccggatggcatgcctttcttggagggagggcatcaaaggggcttcggccccgccgggggagcggcccgcgtcccatcagcttgttggcggggaaaaggcccaccaaggctacgacgggtgtccggcctgagagggcgatcggacgcattgggactgagatacggcccagactcctacgggaggcagcagctaagaatattccgcaatgggcgaaagcctgacggagcgacgccgcgtgcacgatggaggccggaaggttgtaaagtgcttttgggagggaagaagaagcccgggaggaaacgcccgggcggcgacggtacctcgcgaata

SEQ ID NO: 8280 - DNA, 490 bp, unidentified
  misc_feature 1..490: note = Ascusbbf_444483, encodes 16S rRNA
  source 1..490: mol_type = genomic DNA
agagtttgatcctggctcagaacgaacgctggcggcgtgcttaacacatgcaagtcgcacgagaaacggggcttcggcccccgagtaaagtggcgaatgggtgagtaacacgtgagtaacatgccctggagcgggggataaccattcgaaagggtggctaataccgcataagaccccaccgagttcgctcggagtggtcaaagccttttggcacttcaggattggctcgcggaccattagctagttggtggggtaatggcccaccaaggcagtgatggatagctggtctgagaggacgatcagccacactgggactgggacacggcccagactcctgcgggaggcagcagtggggaatcttgcgcaatgggcgaaagcctgacgcagcaacgccgcgtgtgtgaagaaggccctcgggtcgtaaagcactgtcagaggggaagaacgcctacattgttaggtttgacggtaccctcaaaggaagcaccgg

SEQ ID NO: 8281 - DNA, 490 bp, unidentified
  misc_feature 1..490: note = Ascusbbf_203442, encodes 16S rRNA
  source 1..490: mol_type = genomic DNA
agagtttgatcatggctcaggatgaacgctagcggcaggcctaatacatgcaagtcgaacggtaaaatcactttcgggtgattgagagtggcgcacgggtgcgtaacgcgtatgcaacccacccgctgccgggggatagcccggagaaatccgaattaataccccatgaggagaggatgcggcatcgcaaccttttcaaaactttggtggcggcggacgggcatgcgtgccattagatagttggcggggtgacggcccaccaagtcgacgatggctaggggatctgagaggacggtcccccacactggtactgagacacggaccagactcctacgggaggcagcagtaagggatattggtcaatggggggaaccctgaaccagccatgccgcgtgagggaataaggccctacgggtcgtaaacctcttttgccgggggataaggatacctacgcgtaggtatttgaaggtacccggagaataagcatcgg

SEQ ID NO: 8282 - DNA, 490 bp, unidentified
  misc_feature 1..490: note = Ascusbbf_1851777, encodes 16S rRNA
  source 1..490: mol_type = genomic DNA
agagtttgatcctggctcagaacgaacgctggcggcgcgtcttaagcatgcaagtcgagcgggattacctagcttgctaggtgtgagagcggcggactggtgagtaacgcgtgggtgacgtacccttctgacggggatagccggtagaaataccgggtaataccggatacgttctcctgccttggaagcaggagaagaaaggagccacggctccgcaggaggaacggcccgcgtcccatcagctggttggcggggaaaaggcccaccaaggcgatgacgggtatccggcctcagagggtgaccggacacattgggactgagatacggcccagactcctacgggaggcagcagctaagaatattccgcaatggggggaaccctgacggagcgacgccgcgtggacgatgaaggccggaaggttgtaaagtcttttttttgtgcgaggaataagtacggaagggaatgtccgtgcggtgactgtagcacagg

SEQ ID NO: 8283 - DNA, 490 bp, unidentified
  misc_feature 1..490: note = Ascusbbf_728253, encodes 16S rRNA
  source 1..490: mol_type = genomic DNA
agagtttgatcctggctcaggacgaacgctggcggcgtgcctaacacatgcaagtcgaacgaagcttgattgatgaactcttcggagtgattcaagatatgactgagtggcggacgggtgagtaacgcgtgagcaacctgcccatcggagggggatagtgtctggaaacggacagtaataccgcataaagtacggagatggcatcatcatcgtaccaaagatttatcgccgatggatgggctcgcgtctgattagatagttggtggggtaacggcctaccaagtcgacgatcagtagccggactgagaggttgaacggccacattgggactgagacacggcccagactcctacgggaggcagcagtggggaatattgcacaatgggcgcaagcctgatgcagcaacgccgcgtggaggaagacggttttcggattgtaaactcctgttcttagggaagaagacagtgacggtacctaaggagcaagccac

SEQ ID NO: 8284 - DNA, 490 bp, unidentified
  misc_feature 1..490: note = Ascusbbf_982905, encodes 16S rRNA
  source 1..490: mol_type = genomic DNA
agagtttgatcatggctcaggatcaacgctggcggcgtgcctaatgcatgcaagtcgaacggggtcgccttcgggcggctcacgtggcggacgggtgaggaacacgtgggcgatctgccccgaggcgggggatagccaccagaaatggtgggtaagaccgcatgagctcattggcttacgggccagtgaggaaaacgcagcaatgcgtaccttgggaggagcctgcggcggattagctagttggtggggtaacggcctaccaaggcgatgatccgtagctggtctgagaggatggccagcaacaggggaactgagacacggtccccactcctacgggaggcagcagcaaggaattttccgcaatgggcgaaagcctgacggagcaacgccgcgtgggggatgacgcttttcggagtgtaaaccccttttcccagggaagaacacaatgacggtacctggggaataaggaccggctaactacgtgccagca

SEQ ID NO: 8285 - DNA, 490 bp, unidentified
  misc_feature 1..490: note = Ascusbbf_1807592, encodes 16S rRNA
  source 1..490: mol_type = genomic DNA
agagtttgatcctggctcaggatgaacgctggcggcgtgcctaacacatgcaagtcgaacgggtctatcgtcttggaggcttcggccaaagaggctttagattagtggcggacgggtgagtaacgcgtggagaacctgccctgtactgggggataacagtgagaaatcactgctaataccgcataagcgcacgaggccgcatggccctgtgtgaaaaactccggtggtacaggatggctccgcgttggattagccagttggcggggtaacggcccaccaaagcgacgatccatagccggcctgagagggtgaacggccacattgggactgagacacggcccagactcctacgggaggcagcagtggggaatattgcacaatggggggaaccctgatgcagcgacgccgcgtgaaggatgaagtatctcggtatgtaaacttctatcagcagggaagatgatgacggtacctgtctaagaagccccggcta

SEQ ID NO: 8286 - DNA, 490 bp, unidentified
  misc_feature 1..490: note = Ascusbbf_711190, encodes 16S rRNA
  source 1..490: mol_type = genomic DNA
agagtttgatcatggctcaggatgaacgctggcggcgtgcttaatacatgcaagtcgaacggagcttgccggacaaagcccttcggggcagcgtctggcatgtcttagtggcggacgggtgagtaacgcgtggataacctgcctcatgcagggggacaacagctggaaacggctgctaataccgcataagcgcacagcaccgcatggtgcagggcgaaaagatttatcggcatgagatggatccgcgtccgattagccagttggcggggtaacggcccaccaaagctacgatcggtagccggcttgagagagtgaccggccacattgggactgagacacggcccagactcctacgggaggcagcagtagggaatattgcacaatgggggaaaccctgatgcagcgacgccgcgtgggtgatgaagtatttcggtatgtaaagccctatcagcggggaagatagtgacggtacccgcacaagaagccccgg

SEQ ID NO: 8287 - DNA, 490 bp, unidentified
  misc_feature 1..490: note = Ascusbbf_288710, encodes 16S rRNA
  source 1..490: mol_type = genomic DNA
agagtttgatcatggctcaggattaacgctggcggcgtgcataacacattcaagtcgaacggagaaggggcttcggccccggatcagtggcggacgggtgagtaacgcgtgagtaacctgcctgtgtgaggggaataacagatcgaaaggcctgctaataccgcatgacgtacgactgtcgcatggcagaggtaccaaagatttatcgcacacagatggactcgcgttggattagacagttggcggggtaacggcccaccaaatcaacgatccatagccggactgagaggttgaacggccacattggaactgagaaacggtccagactcctacgggaggcagcagtggggaatattgggcaatgggcgaaagcctggcccagcgacgccgcgtgagggaagaaggtcttcggattgtaaacctctttcagcagggaagaagacagtgacggtacctgcagaagaagccacggctaactacgtgccagcag

SEQ ID NO: 8288 - DNA, 490 bp, unidentified
  misc_feature 1..490: note = Ascusbbf_408908, encodes 16S rRNA
  source 1..490: mol_type = genomic DNA
agagtttgatcatggctcaggacgaacgctggcggcgtgcttaacacatgcaagtcgagcggaaaggccctttcgggggtactcgagcggcgaacgggtgagtaacacgtgagtaacctgccttcagcttcgggataaccccgggaaaccggggctaataccgggtattcacattgtttcgcatgggatggtgtggaaagggtttaccggctggggatggactcgcggcctatcagcttgttggtggggtagtggcctaccaaggcgacgacgggtagccggcctgagagggcgaccggccacactgggactgagacacggcccagactcctacgggaggcagcagtgggaatattgcgcaatgggcggaagcctgacgcagcgacgccgcgtgggggatgacggccttcgggttgtaaacctctttcagcagggacgaagcggaagtgacggtacctgcagaagaagctccggctaactacgtgccagc

SEQ ID NO: 8289 - DNA, 490 bp, unidentified
  misc_feature 1..490: note = Ascusbbf_709767, encodes 16S rRNA
  source 1..490: mol_type = genomic DNA
agagtttgatcatggctcagaacgaacgctggcggtgcgttttaagcatgcaagtcgagcggcagtagtagcaatactatgagagcggcggacgggtgagtaacacgtggataatctaccttgaagtttgggatataccgtggaaacacggagtaataccggatacgacggttactggagacagtgattgggaaaggtgctacggcaccgctttgagatgagtccgcggcccattagttagacggcggggtaaaggcccaccgtgacgatgatgggtagccggcctgagagggtgtacggccacattgggactgagacacggcccagactcctacgggaggcagcagctaagaatcttccgcaatggacgaaagtctgacggagcgacaccgcgtgaacgatgaaggccgaaaggttgtaaagttcttttcagttggaggaataagcttttgagggaatgcgagagtgatgacgttaaaactggaataag

SEQ ID NO: 8290 - DNA, 490 bp, unidentified
  misc_feature 1..490: note = Ascusbbf_446062, encodes 16S rRNA
  source 1..490: mol_type = genomic DNA
agagtttgatcctggctcaggacgaacgctggcggcgtgcctaacacatgcaagtcgaacggaatccatggtgtgcttgcacaccggaagatttagtggcgaacgggtgagtaacacgtgagaaacctgccccaaactctgggataactcaaggaaacttgtgctaataccggataccctcatttcatcgcatggtggtttgaggaaagtttttcggtttgggagggtctcgcggcctatcagcttgttggtggggtaatggcctaccaaggcgacgacgggtagctggtttgagagaacgatcagccacactggaactgagacacggtccagactcctacgggaggcagcagtggggaatcttgcgcaatgggcgaaagcctgacgcagcaacgccgcgtgcgggatgaaggccttcgggttgtaaaccgctttcagcagggacgaagatgacggtacctgcagaagaagctccggctaactacgtgcc

SEQ ID NO: 8291 - DNA, 490 bp, unidentified
  misc_feature 1..490: note = Ascusbbf_1833768, encodes 16S rRNA
  source 1..490: mol_type = genomic DNA
agagtttgatcctggctcaggatgaacgctggcggcgtgcttaacacatgcaagtcgaacgaagcatttacgacggactggagagcttgctcaaaggaaagatgtgaatgactgagtggcggacgggtgagtaacgcgtgggtaacctgcctcacacagggggataacagttagaaatgactgctaataccgcataataggaactgccgcatgacagtttcttgaaaactccggtggtgtgagatgggcccgcgtttgattagctagttggtgaggtaacggcccaccaaggcgacgatcaatagccggcttgagagagtgaacggccacatcgggactgagtcacggcccaaactcctacgggaggcagcagtggggaatattgcacaatgggggaaaccctgatgcagcgacgccgcgtgagtgaagaagtatttcggtatgtaaagctctatcagcagggaagataatgacggtacctgactaagaa

SEQ ID NO: 8292 - DNA, 490 bp, unidentified
  misc_feature 1..490: note = Ascusbbf_1828480, encodes 16S rRNA
  source 1..490: mol_type = genomic DNA
agagtttgatcatggctcaggacgaacgctggcggcgtgcttaacacatgcaagtggagcgacgaaccggggcttgccccggggcagagccgcgaacgggtgagtaacacgtgggtcacctgcctcgatgaccgggacaacccgaggaaactcgggctaataccggatgtgctcttcggaggaaaggtagcttcggcttccgcatcgagatgggcccgcggcgcattagcttgttggtggggtaacggcctaccaaggcgacgatgcgtagctggtctgagaggacgatcagccacactgggactgagacacggcccagactcctacgggaggcagcagtggggaatcttgcgcaatgcgcgaaagcgtgacgcagcaacgccgcgtgggggaagaaggccttcgggttgtaaacctctttcagttgggacgaagcttccagggtgaatagccctgcggagtgacggtaccttcacaagaagccccggct

SEQ ID NO: 8293 - DNA, 490 bp, unidentified
  misc_feature 1..490: note = Ascusbbf_332691, encodes 16S rRNA
  source 1..490: mol_type = genomic DNA
agagtttgatcctggctcagaacgaacgctggcggcgcgttttaagcatgcaagtcgaacggtaacaggccttcgggcgctgacgagtggcgaacgggtgagtaacacgtaggtgatctgcccataggttggggatatactgtggaaacacagggtaataccgaatacgttcttgttgttttgacgacaagaagaaaggggcttcggcctcgcctgtggatgagcctgcggctgattagctagttggtggggtaagagcctaccaaggcgacgatcagtagccggcctgagagggtgatcggccacactgggactgagatacggcccagactcctacgggaggcagcagctaagaatcttccgcaatggacgcaagtctgacggagcgacgccgcgtgggtgaagaaggcggaaacgttgtaaagcccttttatagatgaggaataagtgtgggaggaaatgcctgcatgatgacgttagtctatgaata

SEQ ID NO: 8294 - DNA, 490 bp, unidentified
  misc_feature 1..490: note = Ascusbbf_427567, encodes 16S rRNA
  source 1..490: mol_type = genomic DNA
agagtttgatcctggctcaggataaacgctggcggcgtgcttaacacatgcaggtcgaacgaggcattgaagacaaatcttcggaagcgtttttgatgccgagtggcggacgggtgagtaacgcgtgggtaacctgcccggaagagggggacaacagttggaaacgactgctaataccgcataagccgacggggccgcatggccctgccggaaaaggagtgatccgcttccggatggacccgcgtctgattagccggttggcggggtaacggcccaccaaagcgatgatcagtagccggactgagaggttgaacggccacattgggactgagacacggcccaaactcctacgggaggcagcagtggggaatattgcacaatggaggaaactctgatgcagcgacgccgcgtgagtgaagaagtgtttcggcatgtaaagctctatcagcagggaagaaaatgacggtacctgactaagaagccccggcta

SEQ ID NO: 8295 - DNA, 490 bp, unidentified
  misc_feature 1..490: note = Ascusbbf_1897530, encodes 16S rRNA
  source 1..490: mol_type = genomic DNA
agagtttgatcatggctcaggatgaacgctagcggcaggcctaacacatgcaagtcgaacggtaacagcacttcggtggctgacgagtggcgcacgggtgcgtaacgcgtatgcaacctacctcttacagtgggatagcccagggaaacttggattaataccgcatagtatacctggccagcattggcctggtattaaacattcatgggtaagagatgggcatgcgtcctattagttagttggagtggtaacggcaccccaagacggcgataggtaggggccctgagagggggatcccccacactggtactgagacacggaccagactcctacgggaggcagcagtgaggaatattggacaatgggcgggagcctgatccagccatgccgcgtgcaggaagacggccctatgggttgtaaactgcctttgtacgggaagaaacaccccctcgtgagggggcctgacggtaccgtaagaataaggatcggc

SEQ ID NO: 8296 - DNA, 490 bp, unidentified
  misc_feature 1..490: note = Ascusbbf_1838019, encodes 16S rRNA
  source 1..490: mol_type = genomic DNA
agagtttgatcatggctcagattgaacgctggcggcaggcctaacacatgcaagtcgagcgcgaaagccttcgggtgagtagagcggcggacgggtgagtaacgcgtgggaatctacctggtagagggggacaactcggggaaacccgagctaataccgcatacgccctacgggggaaaggaggggatcttcggacctttcactatcagaagagcccgcgtcggattagctagttggtggggtaaaggcctaccaaggcaacgatccgtagctggtctgagaggatgatcagccacactggaactgagacacggtccagactcctacgggaggcagcagtggggaatattgcacaatgggggaaaccctgatgcagccatgccgcgtgtgtgaagaaggctttcgggttgtaaagcactttcagtagggaggaagggttgctggctaatatccagcagcattgacgttacctacagaagaagcaccggct

SEQ ID NO: 8297 - DNA, 490 bp, unidentified
  misc_feature 1..490: note = Ascusbbf_1625592, encodes 16S rRNA
  source 1..490: mol_type = genomic DNA
agagtttgatcctggctcaggatgaacgctggcggcgtgcttaacacatgcaagtcgagcggaaaggcccttcggggtactcgagcggcgaacgggtgagtaacacgtgagcaacctgcccccgactctgggataagcccgggaaactgggtctaataccggatacgacacctccaggcatctggtgggtgtggaaagtcttttcggttggggatgggctcgcggcctatcagcttgttggtggggtagtggcccaccaaggcgacgacgggtagccggcctgagagggcgaccggccacactgggactgagacacggcccagactcctacgggaggcagcagtgggaatattgcacaatgggggaaaccctgatgcagcgacgccgcgtgcgggatgacggccttcgggttgtaaaccgctttcagcagggacgaatcaagacggtacctgcagaagaagcgccggctaactacgtgccagcagccgcg

SEQ ID NO: 8298 - DNA, 490 bp, unidentified
  misc_feature 1..490: note = Ascusbbf_1244376, encodes 16S rRNA
  source 1..490: mol_type = genomic DNA
agagtttgatcctggctcaggacgaacgctggcggcgtgcctaacacatgcaagtcgaacgaagcttgatttcagatttcttcggaatgacgaatgatatgacttagtggcggacgggtgagtaacgcgtgagcaacctgcctttcagagggggataacgtttggaaacgaacgctaataccgcataacgtatgactgtggcatcgcagtgataccaaaggagcaatccgctggaagatgggctcgcgtccgattagatagttggcggggtaacggcccaccaagtcgacgatcggtagccggactgagaggttgaacggccacattgggactgagacacggcccagactcctacgggaggcagcagtgggggatattgcacaatggggggaaccctgatgcagcaacgccgcgtgaaggaagaaggtcttcggattgtaaacttttgtctttggtgacgaagaagtgacggtagccaaggaggaagcca

SEQ ID NO: 8299 - DNA, 490 bp, unidentified
  misc_feature 1..490: note = Ascusbbf_1413581, encodes 16S rRNA
  source 1..490: mol_type = genomic DNA
agagtttgatcctggctcaggacgaacgctggcggcgtgcttaacacatgcaagtcgaacgatgaagcggtgcttgcaccgtggattagtggcgaacgggtgagtaacacgtgagtgacctgtccttgactctgggataagcctgggaaactgggtctaatactggatattgactggcgatcgcatggttgttggttgaaagatttttcggtcaaggttggactcgcggcctatcagcttgttggtggggtagtggcctaccaaggcagtgacgggtagccggcctgagagggtgaccggccacactgggactgagacacggcccagactcctacgggaggcagcagtggggaatattgcacaatgggcgcaagcctgatgcagcgacgccgcgtgggggatgacggccttcgggttgtaaactcctttcgccattgacgaagcccttcggggtgacggtaggtggagaagaagcaccggctgactacgt

SEQ ID NO: 8300 - DNA, 490 bp, unidentified
  misc_feature 1..490: note = Ascusbbf_326265, encodes 16S rRNA
  source 1..490: mol_type = genomic DNA
agagtttgatcatggctcagattgaacgctggcggcaggcctaacacatgcaagtcgagcggaaacaggggagcttgctcccgctgtcgagcggcggacgggtgagtaacgcgcaggaatctacctggtagtgggggatagctcggggaaactcgaattaataccgcatacgtcccaagggagaaagtgggggatcttcggacctcacgctatcagaagagcctgcgtaggattagctagttggtagggtaaaggcctaccaaggcgacgatccttaactggtctgagaggatgatcagtcacaccggaactgagacacggtccggactcctacgggaggcagcagtggggaatattggacaatgggggcaaccctgatccagccatgccgcgtgtgtgaagaaggccttcgggttgtaaagcactttaagttgggaggaaggccttgaagctaataactttgaggattgacgttaccaacagaataagc

SEQ ID NO: 8301 - DNA, 490 bp, unidentified
  misc_feature 1..490: note = Ascusbbf_1575052, encodes 16S rRNA
  source 1..490: mol_type = genomic DNA
agagtttgatcatggctcaggatgaatgctggcggcgtgcctaatacatgcaagtcgagcggtaacagggcttcaccgtgttcttgacactccgggctgattagcgggaggatcgattcgagagcacagtgaagctgctgacgagcggcggacggctgagtaacgcgtgggaacgtaccctaaagtaagggataactagtcgaaagattagctaataccgtatgtgatcttcggattaaagaatttattcgctttaggaacggcctgcgtacgattagatagttggtgaggtaatggctcaccaagtcaacgatcgttagatggtttgagaggatgatcatccagactgggactgagacacggcccagactcctacgggaggcagcagtagggaatctttcacaatgggcgaaagcctgatggagcaacgccgcgtgcaggatgaaggccttcgggttgtaaactgcttttatatccgagaaatatgatg

SEQ ID NO: 8302 - DNA, 490 bp, unidentified
  misc_feature 1..490: note = Ascusbbf_1861741, encodes 16S rRNA
  source 1..490: mol_type = genomic DNA
agagtttgatcctggctcaggacgaacgctggcggcgtgcttaacacatgcaagtcgaacgagggtgtttcgagagcttgctcttgggacagccgagtggcggacgggtgagtaacgcgtgagcaacctgtctcacacagggggataacgcatcgaaagatgtgctaataccgcataagaccacgggggggcatccttctgaggtcaaaggagcaatccggtgtgaggtgggctcgcgtctgattagatagttggtgaggtaacggcccaccaagtcaacgatcagtagccgacctgagagggtgatcggccacattgggactgagacacggcccagactcctacgggaggcagcagtggggaatattgggcaatgggcgcaagcctgacccagcaacgccgcgtgagggaagaaggttttcggattgtaaacctctgtcctatatgaagagaaagagacggtagtataggaggaagccccggctaacta

SEQ ID NO: 8303 - DNA, 470 bp, unidentified
  misc_feature 1..470: note = Ascusbbf_708117, encodes 16S rRNA
  source 1..470: mol_type = genomic DNA
agagtttgatcatggctcagaacgaacgctggcggcaggcttaacacatgcaagtcgaacgcatccttcggggtgagtggcagacgggtgagtaacgcgtgggaacatgcccttcagtttggaataacccagggaaacttgggctaataccggatacgcccttagggggaaagatttatcgctgaaggagtggcccgcgtctgattagctagttggtgaggtaatggctcaccaaggcgacgatcagtagctggtctgagaggatgatcagccacactgggactgagacacggcccagactcctacgggaggcagcagtggggaatattggacaatgggcgcaagcctgatccagccatgccgcgtgagtgatgaaggccttagggttgtaaagctctttcgtccgggacgataatgacggtaccggaagaagaagccccggctaacttcgtgccagcagccgcggtaat

SEQ ID NO: 8304 - DNA, 490 bp, unidentified
  misc_feature 1..490: note = Ascusbbf_224555, encodes 16S rRNA
  source 1..490: mol_type = genomic DNA
agagtttgatcctggctcaggatgaacgctggcggcgtgcctaacacatgcaagtcgaacgggattcacatttcgatgtgatgagagtggcgcacgggtgagtaacacgtagcttatctgccctggagagtgggataacgcaccgaaaggtgtgctaataccgcataagctcacgtcctgtagagggaagtgagaaaagatttatcgctctgggatgaggctgcggcccatcagctagttggtgaggtaatggcttaccaaggcaacgacgggtagggggcctgagagggtggccccccacactgggactgagacacggcccagactcctacgggaggcagcagtgaggaatattgcacaatgggggcaaccctgatgcagcgacgccgcgtgggtgaagaagggtttcggctcgtaaagcccttttctgtgtgacgagagaggacggtagcacaggaataagcgtcggctaactacgtgccagcagccg

SEQ ID NO: 8305 - DNA, 490 bp, unidentified
  misc_feature 1..490: note = Ascusbbf_1844915, encodes 16S rRNA
  source 1..490: mol_type = genomic DNA
agagtttgatcctggctcagagtgaacgctggcggcgtggttaagacatgcaagtcgaacgtgatttttataaatggatccttcgggtgaagcttataaaatgaaagtggcaaacgggtgcgtaacacgtgagcaatctgccctaaagatcggaatagctcggggaaactcgaattaatgccgaatgtggcacgggaattcatgttcctagtgctaaagcttgtaacggcgctttaggaggagctcgcggcctatcagcttgttggtgaggtaaaggctcaccaaggctaagacgggtagctggtctgagaggatgatcagccacactggaactgagacacggtccagacacctacgggtggcagcagtttcgaatcattcacaatgggggcaaccctgatggtgcaacgccgcgtgagggatgaaggccttcgggtcgtaaacctctgtcaccaaggagcaacaagccggttcatagccggccctgagt

SEQ ID NO: 8306 - DNA, 490 bp, unidentified
  misc_feature 1..490: note = Ascusbbf_1714024, encodes 16S rRNA
  source 1..490: mol_type = genomic DNA
agagtttgatcatggctcaggacgaacgctggcggcgtgcctaacacatgcaagtcgagcggggataagaggaacggatgcttcggcggaagggaaacttattccagcggcggacgggtgagtaacgcgtgagcaatctgtccctgacagggggataacacatggaaacaggtgctaataccgcataagaccacggtatcgcatggtacaggggtcaaaggagagatccggtgaggggtgagctcgcgtctgattagatagttggtgaggtaacggcccaccaagtcaacgatcagtagccgacctgagagggtgaacggccacattggaactgagagacggtccaaactcctacgggaggcagcagtggggaatattgggcaatgggcggaagcctgacccagcaacgccgcgtgagggaagaaggttttcggattgtaaacctctgttgtggatgacggaggaagtgacggtaatccacaaggaagcc

SEQ ID NO: 8307 - DNA, 490 bp, unidentified
  misc_feature 1..490: note = Ascusbbf_645959, encodes 16S rRNA
  source 1..490: mol_type = genomic DNA
agagtttgatcatggctcaggacgaacgctggcggcgtgcctaacacatgcaagtcgagcggggacataaggaacggaggcttcggcggaagggaaatatgtttcagcggcggacgggtgagtaacgcgtgaacgatctgtccctgacagggggataacacatggaaacaggtgctaataccgcataagaccacggatctgcatggatcaggggtcaaaggaggaatccggtgaggggtgagttcgcgtctgattagatagttggtgaggtaacggcccaccaagtcaacgatcagtagccgacctgagagggtgatcggccacattggaactgagacacggtccaaactcctacgggaggcagcagtgggaatattgggcaatgggcgaaagcctgacccagcaacgccgcgtgagggaagaaggttttcggattgtaaacctctgtccttggtgacgaaggaagtgacggtagccaaggaggaagccc

SEQ ID NO: 8308 - DNA, 490 bp, unidentified
  misc_feature 1..490: note = Ascusbbf_1085236, encodes 16S rRNA
  source 1..490: mol_type = genomic DNA
agagtttgatcctggctcaggatgaacgctggcggcgtgcgtaacacatgcaagttgggcgacgacggggctgaagtggagacatggaagttctgagcggagcagcggacgggtgagtaagacatgaggagctgtcctttggagggggacaacgtctggaaacggacgctaataccccataggccgagaggttaaagccgagaggtgccaaggggggtgctcgtggcctatcagctagttggtgaggtaacggctcaccaaggcgacgacgggtagccggcctgagagggcgaccggccacactgggactgagatacggcccagactcctacgggaggcagcagtggggaatagtgggcaatgggagagatcctgacccagcgacgccgcgtggacgaagaaggccttcgggtcgtaaagtccttttatgggggaagaaggaagtgacggtaccccatgaataagccccggctaactacgtgccagcagc

SEQ ID NO: 8309 - DNA, 490 bp, unidentified
  misc_feature 1..490: note = Ascusbbf_1109366, encodes 16S rRNA
  source 1..490: mol_type = genomic DNA
agagtttgatcatggctcaggatgaacgctagcggcaggcctaacacatgcaagtcgaggggtagaaagagcttgctcttttgagaccggcgcacgggtgagtaacgcgtatggaacctgccctctacaggggaatagcccagggaaacttggattaatgccccatagcgctgattggcggcattgccattcagctaaagatttatcggtagaggatggccatgcgtcccattagccagttggtgcggtaacggcgcaccaaggctacgatgggtaggggccctgagagggggatcccccacactggtactgagacacggaccagactcctacgggaggcagcagtgaggaatattggacaatgggcgggagcctgatccagccatgccgcgtgcaggaagacagccctatgggtcgtaaactgcttttgtacgggaagaaacacccccacgtgtgggggcttgacggtaccgtacgaataaggaccggc

SEQ ID NO: 8310 - DNA, 490 bp, unidentified
  misc_feature 1..490: note = Ascusbbf_1005728, encodes 16S rRNA
  source 1..490: mol_type = genomic DNA
agagtttgatcatggctcaggatgaacgctagcggcaggcctaatacatgcaagtcgaacgggatggtcgccttcgggcggcctgagagtggcgcacgggtgcgcaacgcgtatgcaaccaacccccgacaggcggatagccggtggaaacgccggataatacgccatggttccggtggagggcatcctctactggataaagctacggcggtcggggacgggcatgcgtcccattagatggtaggcggggtgacggcccacctagtccgcgatgggtaggggatctgagaggacggtcccccacactggtactgagacacggaccagactcctgcgggaggcagcagtaagggatattggtcaatgggggtaaccctgaaccagccatgccgcgtgagggaatgaggccctacgggtcgtgaacctcttttattcggggacaaggacggcgtcgtgaacgccgtttgagggtaccgaaggaataagcatc

SEQ ID NO: 8311 - DNA, 490 bp, unidentified
  misc_feature 1..490: note = Ascusbbf_509924, encodes 16S rRNA
  source 1..490: mol_type = genomic DNA
agagtttgatcatggctcaggacgaacgctggcggcgtgcttaacacatgcaagtcgaacgaagatatatcatttgaagttttcggacggaaaaagatatagactgagtggcggacgggtgagtaacgcgtgagcaatctgcctttaagagggggacaacagttggaaacgactgctaataccgcataagaccacactgacgcatgtcagaggggtcaaaggaaagaaccgcttaaagatgagctcgcgtcccattagttagttggcggggtaaaggcccaccaagacgacgatgggtagccgacctgagagggtgatcggccacactggaactgagacacggtccagactcctacgggaggcagcagtggggaatattgggcaatgggcgcaagcctgacccagcaacgccgcgtgaaggaagaaggtcttcggattgtaaacatctgtcctatgggacgaaggaagtgacggtaccataggaggaagc

SEQ ID NO: 8312 - DNA, 490 bp, unidentified
  misc_feature 1..490: note = Ascusbbf_1577913, encodes 16S rRNA
  source 1..490: mol_type = genomic DNA
agagtttgatcatggctcaggacgaacgctggcggcgtgcttaacacatgcaagtcgaacgctgaagctcccagcttgctgggggtggatgagtggcgaacgggtgagtaacacgtgagtaacctgcccatcactccgggataagcgctggaaacggtgtctaatactggatatgcacaatggccgcatggtctgttgtgggaaagatttatcggtggtggatggactcgcggcctatcagctagatggtgaggtaatggctcaccatggcgacgacgggtagccggcctgagagggtgaccggccacactgggactgagacacggcccagactcctacgggaggcagcagtggggaatagtgcacaatgggcgaaagcctgatgcagcaacgccgcgtgagggatgaatgccttcgggttgtaaacctcttttagtagggaagaagcgcaagtgacggtacctgcagaaaaagcaccggctaactacgt

SEQ ID NO: 8313 - DNA, 490 bp, unidentified
  misc_feature 1..490: note = Ascusbbf_1322126, encodes 16S rRNA
  source 1..490: mol_type = genomic DNA
agagtttgatcctggctcaggatgaacgctagcggcaggcttaacacatgtaagtcgaggggtaacgcggggtagcaatactctggcgacgaccggcgcacgggtgcgtaacgcgtatgcaacctacctgtaacaggggtataacggagagaaatttccactaatcccccatattgttattctttcgcaagttaggataacgaaagcttcggtggttacggacgggcatgcgtgacgcttgctagttggtaaggtaacgccttaccaaggcgacgatgtctaggggggctgagaggcttatccgacacatgggtactgagacacggaccagacacctacgggaggcagcagtgaggaatattggtcaatggacggaagtctgaaccagccatgccgcgtggaggaagaaggtcctatgggttgtaaactccttttgtacgagagtaataagaggcttgcgagcctcgatgagagtatcggacgaataagc

SEQ ID NO: 8314 - DNA, 490 bp, unidentified
  misc_feature 1..490: note = Ascusbbf_1887142, encodes 16S rRNA
  source 1..490: mol_type = genomic DNA
agagtttgatcatggctcaggacgaacgctggcggcgtgcctaacacatgcaagtcgagcggtgacaggaggaacggaggcttcggccgaggggagttctgttatagcggcggacgggtgagtaacgcgtgaacgatctgtccctgacagggggataacacatggaaacaggtgctaataccgcataagaccacagagctgcatggctcaggggtcaaaggagagatccggtgaggggtgagttcgcgtctgattagatagttggtgaggtaacggcccaccaagtcaacgatcagtagccgacctgagagggtgatcggccacattggaactgagagacggtccaaactcctacgggaggcagcagtggggaatattgggcaatgggcgaaagcctgacccagcaacgccgcgtgagggaagaaggttttcggattgtaaacctctgtcctaggtgacgaaggaagtgacggtagccaaggaggaagcc

SEQ ID NO: 8315 - DNA, 490 bp, unidentified
  misc_feature 1..490: note = Ascusbbf_1646735, encodes 16S rRNA
  source 1..490: mol_type = genomic DNA
agagtttgatcatggctcagaataaacgctagcggcaggccttatacatgcaagtcgaggggtaacatgatatagcaatatattgatgacgaccggcgtacgagtgagtaatatatacataacttaccttatcttaagtaatagcctcaagaaattgggattaataacttatatgttgtaagttgaaatgcttacaatgaaagatttttcgagataaaataggtgtatattctattagttagttggtagggtaaaggcttaccaagacgaagatagatagtggctttaagagaaggttcaccacgttgacactgaaacacgggccaaacttctacggaaggcagcagtagggaatattggtcaatgggcgaaagcctgaaccagccatgtcgcgtgcaggattaatgtcttttagactgtaaactgcttttattttgtagcaataagaatttcatgaaattttatgatctacattaagaaaatgtaccgg

SEQ ID NO: 8316 - DNA, 490 bp, unidentified
  misc_feature 1..490: note = Ascusbbf_866474, encodes 16S rRNA
  source 1..490: mol_type = genomic DNA
agagtttgatcatggctcagaatgaacgttggcggcatggattaggcatgcaagtcgcacgagaagctaagtagcttgctacgaagcggagagtggcgaaagggagagtaacgtgtggttacataccctcaggaccaggataacgtcgggaaactgacggtaatactggatgatatctacggattaaatggtgagattccgcctggggattggactgcatactattagcttgttggtggggtaaaggctcaccaaggctgcgatggttaccgggtgtgagagcatggcccggctcactgggattgagacactgcccagacatctacggatggctgcagtcgagaatcttcggcaatggacgaaagtctgaccgagcgatgccgcgtgcgggatgaaggccctcgggttgtaaaccgctgtcagttgggaggaaatgctatggggcaatccctgtagcttgactaatcttcagaggaaggacgggctaagt

SEQ ID NO: 8317 - DNA, 490 bp, unidentified
  misc_feature 1..490: note = Ascusbbf_718081, encodes 16S rRNA
  source 1..490: mol_type = genomic DNA
agagtttgatcatggctcaggacgaacgctggcggcgtgcttaacacatgcaagtcgagcggtaaggctccttcgggagtacacgagcggcgaacgggtgagtaacacgtgagcaatctgcccttctcttcggaataaccattggaaacgatggctaatgccgaatatgacctcggatcacatgttctgaggtggaaagctccggcggagaaggatgagctcgcggcctatcagcttgttggtgaggtaatggctcaccaaggcattgacgggtagccggcctgagagggtgaccggccacactgggactgagacacggcccagactcctacgggaggcagcagtggggaatattggacaatgggcgaaagcctgatccagcaacgccgcgtgagggatgacggccttcgggttgtaaacctctttcagcagggacgaagcgaaagtgacggtacctgcagaagaaggaccggccaactacgtgccagca

SEQ ID NO: 8318 - DNA, 490 bp, unidentified
  misc_feature 1..490: note = Ascusbbf_1825986, encodes 16S rRNA
  source 1..490: mol_type = genomic DNA
agagtttgatcatggctcaggatgaacgctggcggcgtgtttaacacatgcaagtcgagcgagaagtccttcagttgattcttcggatgaaaacagaaggatggaaagcggcggacgggtgagtaacgcgtaggcaacctgccccctgcagagggatagcctcgggaaaccgggattaaaacctcataacgcgcaactgagacatctcagatgcgccaaagatttatcggcaggggatgggcctgcgtctgattagttagttggtggggtaacggcctaccaaggcgacgatcagtagccgacctgagagggtgatcggccacattggaactgagacacggtccaaactcctacgggaggcagcagtggagaatcttgcacaatgggcgcaagcctgatgcagcaacgccgcgtgaaggatgaaggcccttgggtcgtaaacttctgttctaagggaagatagtgacggtaccttaggagcaagtcccgg

SEQ ID NO: 8319 - DNA, 490 bp, unidentified
  misc_feature 1..490: note = Ascusbbf_1783926, encodes 16S rRNA
  source 1..490: mol_type = genomic DNA
agagtttgatcctggctcaggatgaacgctggcggcgtgcttaacacatgcaagtcgaacgaacggagaagagcttgctcttcgaagttagtggcggacgggtgagtaacgcgtgggtaacctgcctcatgcagggggataacgtttggaaacgaacgctaataccgcataaactatggattgccgcatggcaattatagcaaagattttatcggcatgagatggacccgcgttggattagctagttggtgagataacagcccaccaaggcgacgatccatagccggcctgagagggtgaacggccacattgggactgagacacggcccaaactcctacgggaggcagcagtggggaatattgcacaatgggcgcaagcctgatgcagcgacgccgcgtgaaggatgaaggtcttcggattgtaaacttctatcagcagggaagaataaatgacggtacctgactaagaagctccggctaactacgtgcc

SEQ ID NO: 8320 - DNA, 490 bp, unidentified
  misc_feature 1..490: note = Ascusbbf_467719, encodes 16S rRNA
  source 1..490: mol_type = genomic DNA
agagtttgatcatggctcaggacgaacgctggcggcgtgcttaacacatgcaagtcgaacgatgaactccagcttgctggggggattagtggcgaacgggtgagtaacacgtgagtaacctgccctgaactttgggataacttcgagaaatcggagctaatactggataggacttcgcatcgcatggtgtggggtggaaagtttttcggtttgggatggactcgcggcctatcagcttgttggtgaggtaatggctcaccaaggcgacgacgggtagccggcctgagagggtgaccggccacactgggactgagacacggcccagactcctacgggaggcagcagtggggaatattgcacaatgggcgcaagcctgatgcagcaacgccgcgtgggggatgacggccttcgggttgtaaacctcttttgtccaggaagaagccggcttgccggtgacggtactgggagaaaaagcaccggctaactacgt

SEQ ID NO: 8321 - DNA, 490 bp, unidentified
  misc_feature 1..490: note = Ascusbbf_1579994, encodes 16S rRNA
  source 1..490: mol_type = genomic DNA
agagtttgatcctggctcaggatgaacgctagcggcaggcctaatacatgcaagtcgaacggtaaatgtcccttcggggacatgagagtggcgcacgggtgcgtaacgcgtatgcaacccacccgctgccgggggatagcccggagaaatccgaattaataccccatgaggagtgagggaggcatcttcttcatttcaaaactacggtggcggcggacgggcatgcgtgccattagatagttggcggggtgacggcccaccaagtcgacgatggctaggggatctgagaggacggtcccccacactggtactgagacacggaccagactcctacgggaggcagcagtaagggatattggtcaatggggggaaccctgaaccagccatgccgcgtgagggattaaggccctacgggtcgtaaacctcttttgccgggggataaggacagtcacgtgtggctgtttgaaggtacccggagaataagcatcgg

SEQ ID NO: 8322 - DNA, 490 bp, unidentified
  misc_feature 1..490: note = Ascusbbf_1215130, encodes 16S rRNA
  source 1..490: mol_type = genomic DNA
agagtttgatcctggctcaggatgaacgctagcggcaggcctaatacatgcaagtcggacgggagtcccccttcggggggacgagagtggcggacgggtgcgcaacgcgtatgcaacccaccccgacccggggcatagccggtggaaacgccgggtaatgcgccatgagccgcgcagggggcatcccccgcgtggcaaagcgagagcgggacgggacgggcatgcgtcccattagcttgttggcggggtgaaggcccaccaaggctacgatgggtaggggatctgagaggacggtcccccacactggtactgagacacggaccagactcctgcgggaggcagcagtaagggatattggtcaatggccggaaggctgaaccagccatgccgcgtgagggaatgaggccctacgggtcgtgaacctcttttattcggggacaacgtcggcgtcgcgaacgccgtgtgagggtaccgaaggaataagcgtcgg

SEQ ID NO: 8323 - DNA, 490 bp, unidentified
  misc_feature 1..490: note = Ascusbbf_1466709, encodes 16S rRNA
  source 1..490: mol_type = genomic DNA
agagtttgatcctggctcaggacgaacgctggcggcgtgcttaacacatgcaagtcgaacggaaagctcttttcggagagactcgagtggcgaacgggtgagtaacacgtgggtgatctgccctgcactttgggataagcctgggaaactgggtctaataccgaataggaccacggcatgcatgtgctgttgtggaaagcttttgcggtgtgggatgggcccgcggcctatcagcttgttggtggggtgatggcctaccaaggcgacgacgggtagccggcctgagagggtgtccggccacactgggactgagatacggcccagactcctacgggaggcagcagtggggaatattgcacaatgggcgcaagcctgatgcagcgacgccgcgtgggggatgacggccttcgggttgtaaacccctttcagtaccgacgaagcgtgagtgacggtaggtacagaagaagcaccggccaactacgtgccagca

SEQ ID NO: 8324 - DNA, 490 bp, unidentified
  misc_feature 1..490: note = Ascusbbf_1896164, encodes 16S rRNA
  source 1..490: mol_type = genomic DNA
agagtttgatcatggctcaggacgaacgctggcggcgtgcctaatacatgcaagtcgagcggaccaaagaagagcttgctcttcggcggttagcggcggacgggtgagtaacacgtaggcaacctgcctgtacgactgggataactccgggaaaccggagctaataccggatacgtttttcagaccgcatggtctgaaagagaaagacctttggtcacgtacagatgggcctgcggcgcattagctagttggtggggtaacggcctaccaaggcgacgatgcgtagccgacctgagagggtgatcggccacactgggactgagacacggcccagactcctacgggaggcagcagtagggaatcttccgcaatggacgaaagtctgacggagcaacgccgcgtgaacgatgaaggttttcggatcgtaaagttctgttgttagggaagaaccgccgggatgacctcccggtctgacggtacctaacgagaa

SEQ ID NO: 8325 - DNA, 490 bp, unidentified
  misc_feature 1..490: note = Ascusbbf_767802, encodes 16S rRNA
  source 1..490: mol_type = genomic DNA
agagtttgatcctggctcaggatgaacgctagctacaggcttaacacatgcaagtcgaggggcagcatatggtttgcttgcaaaccatgatggcgaccggcgcacgggtgagtaacgcgtatccaacctacccataactaagggataaccggtggaaatgccgcctaataccttatgtattccaaaagagtcctcttttttggaagaaagattaatcggttatggatggggatgcgtccgattaggcagttggcggggtaacggcccaccaagcccgcgatcggtaggggttctgagaggaaggtcccccacataggaactgagacacggtcctaactcctacgggaggcagcagtgaggaatattggtcagtggacgagagtctgaaccagccaagtagcgtgcaggaagacggccctatgggttgtaaactgcttttatacgggaataaatgtgatcacgtgtggttatttgcatgtaccgtatgaat

SEQ ID NO: 8326 - DNA, 490 bp, unidentified
  misc_feature 1..490: note = Ascusbbf_766441, encodes 16S rRNA
  source 1..490: mol_type = genomic DNA
agagtttgatcctggctcaggacgaacgctggcggtgtgcttaacacatgcaagtggtgcgacgaaccaggcttcggcctggggcaaagccgcgaacgggtgagtaacacgtgggtaatctgccccgatgaccgggacaacccgaggaaactcgggctaataccggatgttgtgaacggacataagtctgttcattaaaggtagcttcggcttccgcattgggaggggcccgcggcccattagcttgttggtggggtcaaggcctaccaaggcaacgatgggtagctggtctgagaggacgatcagccacactgggactgagacacggcccagactcctacgggaggcagcagtggggaatcttgcgcaatgcgcgaaagcgtgacgcagcaacaccgcgtgagggaagacagccttagggttgtaaacctctttcagatgggacgaaggtcatccggtgaatagccgaggtggttgacagtaccgtcag

SEQ ID NO: 8327 - DNA, 490 bp, unidentified
  misc_feature 1..490: note = Ascusbbf_1799656, encodes 16S rRNA
  source 1..490: mol_type = genomic DNA
agagtttgatcctggctcaggacgaacgctggcggcgtgcctaacacatgcaagtcgagcgggagacttcggtctccagcggcggacgggtgagtaacacgtgggtaacctgcctcatagagggggatagcctcccgaaagggagattaataccgcataacatcacagtactgcatggtacagtgattaaaggagtaatccgctatgagatggacccgcggcgcattagctagttggtgaggtaacggctcaccaaggccacgatgcgtagccgacctgagagggtgatcggccacattggaactgagacacggtccagactcctacgggaggcagcagtggggaatattgcacaatgggcgaaagcctgatgcagcaacgccgcgtggaggatgaaggccttcgggttgtaaactcttgtcttctgggacgataatgacggtaccagaggaggaagccacggctaactacgtgccagcagccgcggtaa

SEQ ID NO: 8328 - DNA, 490 bp, unidentified
  misc_feature 1..490: note = Ascusbbf_1193960, encodes 16S rRNA
  source 1..490: mol_type = genomic DNA
agagtttgatcatggctcaggacgaacgctggcggcgtgcctaacacatgcaagtcgaacgaagttaagagaaagcttgcttcctcttaacttagtggcggacgggtgagtaacgcgtgagtaacctgcctttcagagggggataacgtctggaaacggacgataataccgcataacatttcggagctgcatggttctgaaatcaaaggagtaatccactggaagatggactcgcgtccgattagctagttggtgagataatagcccaccaaggcgacgatcggtagccgggttgagagactgaacggccacattgggactgagacacggcccagactcctacgggaggcagcagtgggggatattgcacaatggaggaaactctgatgcagcaacgccgcgtgagggaagacggttttcggattgtaaacctctgtcttcagggaagattatgacggtacctgaagaggaagctccggctaactacgtg

SEQ ID NO: 8329 - DNA, 490 bp, unidentified
  misc_feature 1..490: note = Ascusbbf_1780555, encodes 16S rRNA
  source 1..490: mol_type = genomic DNA
agagtttgatcctggctcaggacgaacgctggcggcgtgcttaacacatgcaagtcgaacgaggatcaaggaagagcttgctctgagatgatccgagtggcggacgggtgagtaacgcgtgaacaatctgtctcacacaggggaataacgcatcgaaagatgtgctaataccgcataggaccacgggagggcatcctcttgaggtgaaaggagcaatccggtgtgaggtgagttcgcgtctgattagatagttggtggggtaacggctcaccaagtcaacgatcagtagccgacctgagagggtgatcggccacattgggactgagacacggcccagactcctacgggaggcagcagtggggaatattgggcaatgggcgaaagcctgacccagcaacgccgcgtgaaggaagaaggttttcggatcgtaaacttctgtccttgttgaagagcgaaagacggtaggcaaggaggaagccccggctaacta

SEQ ID NO: 8330 - DNA, 490 bp, unidentified
  misc_feature 1..490: note = Ascusbbf_1193755, encodes 16S rRNA
  source 1..490: mol_type = genomic DNA
agagtttgatcctggctcagaacgaacgctggcagcgtggattaggcatgcaagtcgaacgggatcagctggttagcaataattggctgtgagagtggcggattggggaggaacacgtgagcaacctgcccttgggacggggaaaaccgttggaaacgacggctaataccggatgcggcgtcgcgggacatcccgcgaacgtcaaagggggccgcaaggctcccgcccgaggaggggctcgcgcaccatcagcttgttggcggggtaacggcccaccaaggcttacggttagctggtctgagaggatggccagccccactgggactgagatactgcccagactcctacgggaggctgcagtcgaggatcattcgcaatgggcgaaagcctgacgatgcgacgctgcgtggaggatgaaggccttcgggtcgtaaactcctgtcatgggggaaaaggcgaggggagctaacacctcccttagttgatggta

SEQ ID NO: 8331 - DNA, 489 bp, unidentified
  misc_feature 1..489: note = Ascusbbf_1064135, encodes 16S rRNA
  source 1..489: mol_type = genomic DNA
agagtttgatcctggctcaggattaacgctggcggcgtgcctaatacatgcaagtcgaatggtagcaataccatggcgaacgggtgagtaacacgtaggtaacctatctaaaagacgaggataaccactggaaacggtggataatactggataggacatttgaaggcatctttggatgtttaaagatttatcactttaagaggggcctgcggcgcattagctagttggtagggtaatagcctaccaaggcgatgatgcgtagccggactgagaggttgaacggccacaatgggactgagaacggcccatactcctacgggaggcagcagtagggaattttcggcaatgggcggaagcctgaccgagcaacgccgcgtgaacgaagaagtatttcggtatgtaaagttcttttatttgggacgaaaaggtttgactgacggtaccaaatgaataagctccggctaactacgtgccggcagccgcggtaat

SEQ ID NO: 8332 - DNA, 490 bp, unidentified
  misc_feature 1..490: note = Ascusbbf_1578175, encodes 16S rRNA
  source 1..490: mol_type = genomic DNA
agagtttgatcctggctcaggacgaacgctggcggcgtgcctaacacatgcaagtcgaacggacgagaggagcttgctcctcaagttagtggcgaacgggtgagtaacgcgtgagcaacctgcccttcagagggggacaacagctggaaacggctgctaataccgcatgacatttttccgaggcatctcggggatatcaaagatttatcgctgaaggatgggctcgcgtctgattagatagttggcggggcaacggcccaccaagtcgacgatcagtagccggactgagaggttgaacggccacattgggactgagatacggcccagactcctacgggaggcagcagtggggaatattgggcaatgggcgcaagcctgacccagcaacgccgcgtgaaggaagaaggctttcgggttgtaaacttctttgacgagggacgaaggaaatgacggtacctcgaaaacaagccacggctaactacgtgccagc

SEQ ID NO: 8333 - DNA, 490 bp, unidentified
  misc_feature 1..490: note = Ascusbbf_729188, encodes 16S rRNA
  source 1..490: mol_type = genomic DNA
agagtttgatcatggctcaggatgaacgctggcggcgtgcttaacacatgcaagtcgaacggagaaccctggaaagagttttcggacaatggaaaggaattcttagtggcggacgggtgagtaacgcgtgaggaacctgccttggagtggggaataacacagagaaatttgtgctaataccgcatgaagcagttgggtcgcatggctctgactgccaaagatttatcgctctgagatggcctcgcgtctgattagctggttggcggggtaacggcccaccaaggcgacgatcagtagccggactgagaggttggccggccacattgggactgagacacggcccagactcctacgggaggcagcagtggggaatattgggcaatgggcgcaagcctgacccagcaacgccgcgtgaaggaagaaggccctcgggttgtaaacttcttttcttcgggacgaaggaagtgacggtaccgaaggaataagccac

SEQ ID NO: 8334 - DNA, 490 bp, unidentified
  misc_feature 1..490: note = Ascusbbf_1495492, encodes 16S rRNA
  source 1..490: mol_type = genomic DNA
agagtttgatcatggctcaggataaacgctggcggcgcacataagacatgcaagtcgaacggaggtcgttacaaaacggattgaagatttatctgagagaagttaagtaacaaaggccttagtggcggactggtgagtaacacgtaagcaacctacctataagaggggaataacactgagaaatcagtgctaataccgcataagctagaggtatcgcatgatacagctagaaaaggagcaatccactaatagatgggcttgcggctgattagctagttggtggggcaacggcctaccaaggcaacgatcagtagccggactgagaggttgaacggccacattgggactgagatacggcccagactcctacgggaggcagcagtcgggaatattgcgcaatggagggaactctgacgcagtgacgccgcgtataggaagaaggttttcggattgtaaactattgtcgttagggaagaaaaggacagtacct

SEQ ID NO: 8335 - DNA, 490 bp, unidentified
  misc_feature 1..490: note = Ascusbbf_1050926, encodes 16S rRNA
  source 1..490: mol_type = genomic DNA
agagtttgatcatggctcaggatgaacgctggcggcgtgcctaacacatgcaagtcgagcgagaaatcacggaacagagattcgtcaacgggaagtggtggacagcggcggacgggtgagtaacgcgtaggtaacctaccttatactgaaggatagcctagggaaacctggattaatacttcataatgcattaatatcacatggtgtaaatgccaaagatttatcggtataagatggacctgcgtctgattagatagttggtgaggtaacggcccaccaagtcaacgatcagtagccgatctgagaggataatcggccacattggaactgagacacggtccaaactcctacgggaggcagcagtggggaatattgcacaatgggcgaaagcctgatgcagcaacgccgcgtgagcgatgaaggtcttcggattgtaaagctctgtcctctgggacgaagaaagtgacggtaccagaggaggaagccccgg

SEQ ID NO: 8336 - DNA, 490 bp, unidentified
  misc_feature 1..490: note = Ascusbbf_1806688, encodes 16S rRNA
  source 1..490: mol_type = genomic DNA
agagtttgatcctggctcaggacgaacgctggcggcgtgcctaatacatgcaagtcgaacgggtgacctcttggtggcaacaccttgagtgatccagtggcgaacgggtgagtaacacgtgagaaacctaccccgaagaccgggataaccagaggaaactctggctaataccggatacccccttcggaccgcatggtctgatgaggaaatggattccgcttcgggagggtctcgcggcctatcagcttgttggtggggtaacggcctaccaaggcttcgacgggtagctggtctgagaggacgatcagccacactgggactgagacacggcccagactcctacgggaggcagcagtagggaatcttgcgcatgggcgaaagcctgacgcagcaacgccgcgtgcgggatgaaggccttcgggttgtaaaccgctttcagcagggacgaaaatgacggtacctgcagaagaagccccggccaactacgtgc

SEQ ID NO: 8337 - DNA, 490 bp, unidentified
  misc_feature 1..490: note = Ascusbbf_181676, encodes 16S rRNA
  source 1..490: mol_type = genomic DNA
agagtttgatcctggctcagattgaacgctggcggcaggcctaatacatgcaagtcgaacggtaacataagaaaagcttgcttttcttgatgacgagtggcggacgggtgagtaacatttgggaaactacctgatagagggggacaacagttggaaacgactgctaataccgcatacagcctaagggtgaaagaagcaattcgctatcagatgtgcccaaacgggattagctagtaggcggggtaagagcccacctaggcgacgatctctagctggttttagcggatgatcagccacattggaactgagacacggtccaaactcctacgggaggcagcagtagggaatattgcacaatggagggaactctgatgcagccatgccgcgtgtgtgaagaaggccttcgggttgtaaagcactttagttttcgagaaagggtgcaattcgaatagggttgtattcagatgttagaaaaagaataagtaccggc

SEQ ID NO: 8338 - DNA, 490 bp, unidentified
  misc_feature 1..490: note = Ascusbbf_30642, encodes 16S rRNA
  source 1..490: mol_type = genomic DNA
agagtttgatcatggctcaggatgaacgctagcggcaggcttaacacatgcaagtcgaggggcagcatgggagcgtggcaacacattcccgatggcgaccggcgcaagggtgcgtaacgcgtgagcaacttgcccgcatcaggggcataatcggtggaaacgccgtctaactccccataacatattttgcggcatcgcagaatattgaaatccttggaggatgcggatgggctcgcgtggcattaggcagttggcggggtaacggcccaccaaaccgacgatgcctaggggaactgagaggttagtcccccacactggaactgagacacggtccagactcctacgggaggcagcagtgaggaatattggacaatggagggaactctgatccagccatgccgcgtgcaggataaggtcctatggattgtaaactgcttttgtacgggagcaataaggcccacgcgtgggtcgatgagagtaccgtacgaat

SEQ ID NO: 8339 - DNA, 490 bp, unidentified
  misc_feature 1..490: note = Ascusbbf_17087, encodes 16S rRNA
  source 1..490: mol_type = genomic DNA
agagtttgatcatggctcaggatgaacgctggcggcgtgcataacacattcaagtcgaacggacgaggccccttcggggaccaagtcagtggcggacgggtgagtaacgcgtgagcaacctgcctatgcgagggggataacagttggaaacgactgctaataccgcataacgcacggaggaggcatctcttccatgccaaagatatattgcgcatagatgggctcgcgtccgattagatagttggtgaggtaacggcccaccaagtcgacgatcggtagccggactgagaggttgaacggccacattggaactgagagacggtccagactcctacgggaggcagcagtggggaatattgggcaatgggcgaaagcctgacccagcgacgccgcgtgagtgaagaaggtcttcggattgtaaagcttagttatcggggaagaaggaagtgacggtacccgaagagaaagccacggctaactacgtgccagc

SEQ ID NO: 8340 - DNA, 490 bp, unidentified
  misc_feature 1..490: note = Ascusbbf_12806, encodes 16S rRNA
  source 1..490: mol_type = genomic DNA
agagtttgatcatggctcaggataaacgctggcggcgcgcataacacatgcaagtcggacgagaaacttggcttcggtcaaggatctagtggcggacgggtgagtaacacgtggacaacttgtcttatagaggggaatagccggaagaaatttcgattaataccgcataatgtggcgatattgcatgatattgccaagaaagatgaaaatcgctatgagagaggtctgcgtctgattagctagttggagtggtaatggcacaccaaggcgacgatcagtagccggtttgagagaatgaacggccacattgggactgagatacggcccagactcctacgggaggcagcagtggggaatattgcgcaatgggggaaaccctgacgcagcgacgccgtgtaagggaagaaggttttcggatcgtaaacctatatcgattgtgaaaagcaaggatggtagcaaagtaagaagccccggctaactacgtgccagc

SEQ ID NO: 8341 - DNA, 490 bp, unidentified
  misc_feature 1..490: note = Ascusbbf_126697, encodes 16S rRNA
  source 1..490: mol_type = genomic DNA
agagtttgatcatggctcaggatgaacgctggcggcaggcttaatacatgcaagtcgaacggtaaggccgagcgtagcaatacgcgaggtacacgagtggcgcacgggtgcgtaacgcgtatgcaacctgcccccttccgggacaaaacgtcgagaaattggcgctaatatcccatggcgaccttatgaggcatctcgttgggtccaaagattcattggaaggggatgggcatgcgtatcattagcttgttggcggggtaacggcccaccaaggcgacgatgattaggggttctgagaggaaagtcccccacactggaactgagacacggtccagactcctacgggaggcagcagtagggaatattgggcaatgggagcaatcctgacccagccatgccgcgtgaaggaatacggccctacgggtcttaaacttcttttgccgcggagtaaccgccgggacgcgtcccggcctgagagtacgcggcgaat

SEQ ID NO: 8342 - DNA, 490 bp, unidentified
  misc_feature 1..490: note = Ascusbbf_1818538, encodes 16S rRNA
  source 1..490: mol_type = genomic DNA
agagtttgatcctggctcaggatgaacgctagcggcaggcttaacacatgcaagtcgaggggcagcataagagcgtagcaatacattcttgatggcgaccggcgcaagggtgcgtaacgcgtgagcaacttgcccgcatcaggggcataatcggtggaaacgccgtctaactccccataacatagagagtggcatcactttttattgaaatccttggaggatgcggatgggctcgcgtgacattaggcagttggcggggtaacggcccaccaaaccaacgatgtctaggggaactgagaggttaatcccccacactggaactgagacacggtccagactcctacgggaggcagcagtgaggaatattggacaatggagggaactctgatccagccatgccgcgtgcaggataaggtcctatggattgtaaactgcttttgtacgggagcaataagggctacgcgtagcctgatgagagtaccgtacgaat

SEQ ID NO: 8343 - DNA, 490 bp, unidentified
  misc_feature 1..490: note = Ascusbbf_151755, encodes 16S rRNA
  source 1..490: mol_type = genomic DNA
agagtttgatcctggctcaggatgaacgctagcggcaggcttaacacatgcaagtcgaggggcagcgcggggtagcaatactctggcggcgaccggcgaaagggtgagtaacgcgtgagcaacatgcccgtagttgggggatagtcattggaaacgatgcgtaataccccgtaacaacagaccccgcatgaggtttgtttaagagatttattgtctacggattggctcgcgtcccattagctagttggcggggtaacggcccaccaaggcgacgatgggtaggggttctgagaggaaggtcccccacattggaactgagacacggtccagactcctacgggaggcagcagtgaggaatattggacaatggccgggaggctgatccagccatgccgcgtgcgggaggacggccctatgggttgtaaaccgcttttgtcggggagcaataaggtccacgtgtggactgatgagagtacccggcgaataagca

SEQ ID NO: 8344 - DNA, 490 bp, unidentified
  misc_feature 1..490: note = Ascusbbf_237674, encodes 16S rRNA
  source 1..490: mol_type = genomic DNA
agagtttgatcctggctcagaacgaacgctggcggcatggattaggcatgcaagtcgaacgctcatcttcggatgggagtggcggaagggtgaggaacgcgtgagtaatctgcccccaagttgggaataacagttggaaacgactgctaataccgaatgtggctggacgggcgcatgtctgtttggctaaagatttatcgcttggggatgagctcgcgtcccattagctggttggtgaggtaacggctcaccaaggcgacgatgggtagctggtctgagaggatggtcagccacactgggactgagacactgcccagactcctacgggaggctgcagtcgagaatcttgggcaatgcgcgcaagcgtgacccagcaatgccgcgtgcgggatgaaggtcttcggattgtaaaccgctgtcactcgggacgaacacaatgacggtaccgagggaggaagccacggctaactacgtgccagcagccgcggta

SEQ ID NO: 8345 - DNA, 490 bp, unidentified
  misc_feature 1..490: note = Ascusbbf_118470, encodes 16S rRNA
  source 1..490: mol_type = genomic DNA
agagtttgatcatggctcaggatgaacgctagctacaggcctaacacatgcaagtcgaggggcagcatgaagaaagcttgctttctttgatggcgaccggcgaatgggtgagtcacgcgtgtccaacctgcccccggcccggggatagcccttggaaatgaggattaagacccgatacgtggagtttccgcatggcggctccatgaaaccggcaggggatggggacgcgtcggattagcttgacggcggggcgacggcccaccgtggcgacgatccgcaggggttctgagaggaaggtcccccacactggcactgagacacgggccagactcctacgggaggcagcagtgaggaatattggtcaatgggcgagagcctgaaccagccaagtagcgtgcaggacgacggccctacgggttgtaaactgcttttgcgggaggataaacggcgccacgtgtggcgccctgcaggtatcccgtgaataaggacc

SEQ ID NO: 8346 - DNA, 490 bp, unidentified
  misc_feature 1..490: note = Ascusbbf_614570, encodes 16S rRNA
  source 1..490: mol_type = genomic DNA
agagtttgatcatggctcagattgaacgctggcggcatgctttacacatgcaagtcgaacggtaacaggggcttcggtccgctgacgagtggcgaacgggtgagtaatgcgtcggaacgtgccgagtaatgggggataacgcatcgaaaggtgtgctaataccgcatacgctctgaggaggaaagctggggatcgaaagacctggcgttattcgagcggccgacgtctgattagctagttggtgaggtaaaggctcaccaaggcgacgatcagtagcgggtctgagaggatgatccgccacactgggactgagacacggcccagactcctacgggaggcagcagtggggaattttggacaatgggcgcaagcctgatccagccatgccgcgtgtctgaagaaggccttcgggttgtaaaggacttttgttagggagcaagtcctgcaggttaagagccagtagggatgagagtacctaaagaataagcac

SEQ ID NO: 8347 - DNA, 467 bp, unidentified
  misc_feature 1..467: note = Ascusbbf_617937, encodes 16S rRNA
  source 1..467: mol_type = genomic DNA
agagtttgatcatggctcagaacgaacgctggcggcaggcttaacacatgcaagtcgagcgcctcgcaagaggagcgggagacgggtgagtaacacgtgggaacataccctttactacggaacaactccgggaaactggagctaataccgtatgtgccctttgggggaaagatttatcggtaaaggattggcccgcgttggattagctagttggtggggtaaaggcctaccaaggcgacgatccatagctggtctgagaggatgatcagccacattggaactgagacacggcccaaactcctacgggaggcagcagtggggaatattggacaatgggcgcaagcctgatccagccatgccgcgtgagtgatgaaggccttagggttgtaaagctctttcaccgatgaagataatgacggtagtcggagaagaagccccggctaacttcgtgccagcagcgcggtaat

SEQ ID NO: 8348 - DNA, 490 bp, unidentified
  misc_feature 1..490: note = Ascusbbf_942523, encodes 16S rRNA
  source 1..490: mol_type = genomic DNA
agagtttgatcatggctcaggacgaacgctggcggcgtgcctaatacatgcaagtcgagcggagctgaggagaagcttgcttctctgaagcttagcggcggacgggtgagtaacacgtaggcaacctgcctgcaagaccgggataactgacggaaacgtgagctaataccggataggcggacttctcgcatgaggggttcgggaaaggcggcgcaagctgtcacttgcagatgggcctgcggcgcattagctagttggtggggtaacggctcaccaaggcgacgatgcgtagccgacctgggagggtgatcggccacactgggactgagacacggcccagactcctacgggaggcagcagtagggaatcttccgcaatggacgaaagtctgacggagcaacgccgcgtgagtgaggaaggccttcgggtcgtaaagctctgttgccagggaagaacgccaaggagagtaactgctctttgggtgacggta

SEQ ID NO: 8349 - DNA, 490 bp, unidentified
  misc_feature 1..490: note = Ascusbbf_525292, encodes 16S rRNA
  source 1..490: mol_type = genomic DNA
agagtttgatcctggctcaggacgaacgctggcggcgtggattaggcatgcaagtcgagcgatatctaaccttcgggttagtgaaagcggcgaacgggtgagtaacacgtggacaacctgccctcacattccggataatagaccgaaaggtcttgtaatacgggcgaggattctcctgaggcatctcgggggaagggaaggcgcaagccgtgcgaggaggggtccgcgaattatcaggtagatggtggggtaatggcctaccatgcctacgacgattagctggtctgagaggatggtcagccacactgggactgagacactgcccagactcctacgggaggctgcagtcgagaatcttgcacaatgcgcgaaagcgtgatgcagcgacgccgcgtgaaggatgaaggcccttgggtcgtaaacttcttttatcggggaagaataaatgacggtacccgatgaataagccacggctaactacgtgccagca

SEQ ID NO: 8350 - DNA, 490 bp, unidentified
  misc_feature 1..490: note = Ascusbbf_505899, encodes 16S rRNA
  source 1..490: mol_type = genomic DNA
agagtttgatcctggctcaggatgaacgctggcggcgtgcctaacacatgcaagtcgagcgagaagccgtgaagtggagattcgtcaaagcgacatggtggatagcggcggacgggtgagtaacgcgtaggtaacctgccccttacacagggatagcctcgggaaaccgggattaatacctgataaagcggagggaacacatgtttccatcgccaaagatttatcggtgagggatggacctgcgtctgattagctggttggtgaggtaacggcccaccaaggcaacgatcagtagccgacctgagagggtaatcggccacattggaactgagacacggtccaaactcctacgggaggcagcagtggggaatattgcacaatgggcgcaagcctgatgcagcaacgccgcgtgagcgaagaaggtcttcggatcgtaaagctctgtcctatggaacgaagaagtgacggtaccatgggaggaagccccggc

SEQ ID NO: 8351 - DNA, 490 bp, unidentified
  misc_feature 1..490: note = Ascusbbf_516058, encodes 16S rRNA
  source 1..490: mol_type = genomic DNA
agagtttgatcatggctcaggatgaacgctggcggcgcgcataacacatgcaagtcgaacggagtcacattgaaacctagtgatttgtgacttagtggcggacgggtgagtaacgcgtgggtaacctgcctggtattgggggacaacagttagaaatgactgctaataccgcatacgacgtcggggaggcatctccctgacgggaaaggaattatccgatatcagatggacccgcgtctgattagctagttggtgaggtaacggcccaccaaggcgacgatcagtagccgaactgagaggttgaccggccacattgggactgagacacggcccaaactcctacgggaggcagcagtggggaatattgcacaatgggggaaaccctgatgcagcgacgccgcgtgagtgatgaagtatttcggtatgtaaagctctatcgatggggaagaaaatgacggtacccaagtaagaagccccggctaactacgtg

SEQ ID NO: 8352 - DNA, 490 bp, unidentified
  misc_feature 1..490: note = Ascusbbf_1446159, encodes 16S rRNA
  source 1..490: mol_type = genomic DNA
agagtttgatcctggctcaggatgaacgctagctacaggcttaacacatgcaagtcccggggcatcgcgaagggtagcaatactctttggcggcgaccggcggatgggtgagtaacgcgtatccaacctggccctatctcgggcacagcccctcgaaagagggattaattcccgatgttcccgttagttcgcatgttctttcgggcaaagatatttatcggatagggatggggatgcgttccattaggcagtcagcggggtaacggcccaccgagccttcgttggataggggttctggggggattgccccccacactgggacgtgaactcggcccagactcctacgggaggcagcagtgaggaatattggtcaatggcggtaacgctgaaccagccaagtagcgtgagggattacggccctacgggtcttaaacctcttttgttggggagcaacctgtgccacctgtggcacactgcgagtacccttcga

SEQ ID NO: 8353 - DNA, 490 bp, unidentified
  misc_feature 1..490: note = Ascusbbf_543007, encodes 16S rRNA
  source 1..490: mol_type = genomic DNA
agagtttgatcatggctcaggacgaacgctggcggcgtgcttcacacatgcaagtcgaacggaaaggcccagcttgctgggtgctcgagtggcgaacgggtgagtaacacgtgagtaatctgcctttggctttgggataagcctcggaaacggggtctaatactggatatgacttctgcctgcatgggtgggagtggaaaggttttccggctggagatgggctcgcggtctatcagcttgttggtggggtaatggctcaccaaggctttgacggatagccggcctgagagggcgaccggccacactgggactgagacacggcccagactcctacgggaggcagcagtggggaatattgcgcaatgggcgaaagcctgacgcagcgacgccgcgtgagggatgacggccttcgggttgtaaacctctttcagcagggacgaagtgcgaatgacggtacctgcagaagaagcgccggctaactacgtgccag

SEQ ID NO: 8354 - DNA, 490 bp, unidentified
  misc_feature 1..490: note = Ascusbbf_686377, encodes 16S rRNA
  source 1..490: mol_type = genomic DNA
agagtttgatcatggctcaggatgaacgctagcggcaggcctaacacatgcaagtcgaggggtagaggaagcttgcttccttgagaccggcgcacgggtgcgtaacgcgtatgcaatctaccttatactaagggatagcccagagaaatttggattaataccttatggttaatttgtttggcatcattcgaattataaagatttattggtataagatgagcatgcgtcccattagttagttggtaaggtaacggcttaccaagacgatgatgggtaggggtcctgagagggagatcccccacactggtactgagacacggaccagactcctacgggaggcagcagtgatgaatattggtcaatggaggcaactctgaaccagccatgccgcgtgcaggatgacggtcctatggattgtaaactgcttttgtacaggaagaaaacatgctacgtgtagcaacttgacggtactgtaagaataaggatcggc

SEQ ID NO: 8355 - DNA, 490 bp, unidentified
  misc_feature 1..490: note = Ascusbbf_604861, encodes 16S rRNA
  source 1..490: mol_type = genomic DNA
agagtttgatcatggctcaggatgaacgctagcggcaggcctaatacatgcaagtcgaacgggattggggagcttgcttcccatgagagtggcgtacgggtgcgtaacgcgtgagcaacctaccgttgtcagggggatagcccggagaaatccggattaataccgcataacatcagcgaatagcattattttctgatcaaacatttatgggacaacgatgggctcgcgtgacattagctagttggagtggtaacggcacaccaaggcgacgatgtctaggggatctgagaggatgaccccccacactgggactgagacacggcccagactcctacgggaggcagcagtaaggaatattggtcaatggaggcaactctgaaccagccatgccgcgtgcaggaagaatgccctctgggttgtaaactgcttttaccagggaataaacccttctacgtgtaggaggctgaatgtacctgaggaataaggatcg

SEQ ID NO: 8356 - DNA, 490 bp, unidentified
  misc_feature 1..490: note = Ascusbbf_628613, encodes 16S rRNA
  source 1..490: mol_type = genomic DNA
agagtttgatcctggctcaggatgaacgctagctacaggcttaacacatgcaagtcgaggggcagcatgcgggttgcttgcaacccgtgatggcgaccggcgcacgggtgagtatcgcgtatccaacctgcccataagtagggaataaccggtagaaatgccgactaatgccctatgtggttcgatgaggacatctgagtcgaattaaagattcatcgcttatggatggggatgcgtccgattagcttgttggcggggtaacggcccaccaaggcgacgatcggtaggggttctgagaggaaggtcccccacataggaactgagacacggtcctaactcctacgggaggcagcagtgaggaatattggtcaatgggcgcgagcctgaaccagccaagtagcgtgcaggatgacggccctatgggttgtaaactgcttttatgcggggataaagtcgcccacgtgtgggcgtttgcaggtaccgcatgaat

SEQ ID NO: 8357 - DNA, 490 bp, unidentified
  misc_feature 1..490: note = Ascusbbf_446559, encodes 16S rRNA
  source 1..490: mol_type = genomic DNA
agagtttgatcatggctcaggatgaacgctagcgataggcctaacacatgcaagtcgaggggcagcacatgaggtagcaatacttctggtggcgaccggcgcacgggtgagtaacacgtatgcaacctaccttcaacaggcggataaccccgggaaatcggggctaatacgccataacacagggatcccgcatgggaatatttgttaaagatttatcggttgtagatgggcatgcgttccattagctagttggtgaggtaagggctcaccaaggcaacgatggataggggaactgagaggtttatcccccacactggtactgagacacggaccagactcctacgggaggcagcagtgaggaatattggtcaatggaggcaactctgaaccagccacgtcgcgtgaaggaagacggccctacgggttgtaaacttcttttgcaagggaataaagtgagtcacgtgtgactttttgcatgtaccttgcgaat

SEQ ID NO: 8358 - DNA, 490 bp, unidentified
  misc_feature 1..490: note = Ascusbbf_1681137, encodes 16S rRNA
  source 1..490: mol_type = genomic DNA
agagtttgatcatggctcaggatgaacgctggcggcgtgcctaatacatgcaagtcgaacgctcgacttcaaacaagcttgcttgaatgaagaagagagtggcgaacgggtgagtaatacataagtaatctgcccctgcaactgggataaccattggaaacgatggctaataccggatagttcaatttatggcatcatgaattgattaaagatgggatacatcgagcagggatgagcttatggtgcattagctagttggtaaggtaatggcttaccaaggccgtgatgcatagccgacctgagagggtgaccggccacactgggactgagacacggcccagactcctacgggaggcagcagtagggaattttcggcaatgggggcaaccctgaccgagcgacgccgcgtgagtgaagaaggccttcgggttgtaaagctctgttgtaagggaagaatggcaccagcagggaatggctggtgattgacggt

SEQ ID NO: 8359 - DNA, 490 bp, unidentified
  misc_feature 1..490: note = Ascusbbf_616120, encodes 16S rRNA
  source 1..490: mol_type = genomic DNA
agagtttgatcctggctcaggatgaacgctagcgacaggcctaacacatgcaagtcgaggggtagcagagatgtagcaatacatttgctgacgaccggcgcacgggtgagtaacgcgtatgcaacctacctactacagggggatagcccgaagaaattcggattaacaccgcataatactattttttcgcatggaattatagttaaaaatttattggtagtagatgggcatgcgttccattagccagttggtgaggtaacggctcaccaaagcaacgatggataggggaactgagaggtttatcccccacactggtactgagacacggaccagactcctacgggaggcagcagtgaggaatattggtcaatggacgagagtctgaaccagccaagtcgcgtgaaggatgactgccctatgggttgtaaacttcttttgtgctagagtaaaaaagagtatgtatactctcttgcaagtatagtacgaataa

SEQ ID NO: 8360 - DNA, 490 bp, unidentified
  misc_feature 1..490: note = Ascusbbf_49855, encodes 16S rRNA
  source 1..490: mol_type = genomic DNA
agagtttgatcctggctcaggatgaacgctagcgacaggcttaacacatgcaagtcgaggggcatcatgaggtagcaataccttgatggcgaccggcgcacgggtgagtaacgcgtatgcaacctgcctgataccggggtatagcccatggaaacgtggattaacaccccatagtacttttatcctgcctgggatgtgagttaaatgttcaaggtatcggatgggcatgcgtcctattagttagttggcggggtaacagcccaccaagacgatgataggtaggggttctgagaggaaggtcccccacattggaactgagacacggtccaaactcctacgggaggcagcagtgaggaatattggtcaatggacgagagtctgaaccagccaagtcgcgtgagggaagactgccctatgggttgtaaacctcttttataagggaagaataagttctacgtgtagaatgatgcctgtaccttatgaataagca

SEQ ID NO: 8361 - DNA, 490 bp, unidentified
  misc_feature 1..490: note = Ascusbbf_59917, encodes 16S rRNA
  source 1..490: mol_type = genomic DNA
agagtttgatcatggctcaggatgaacgctggcggcgtgcttaatacatgcaagtcgaacgaagcacccctcccgatgatatgacgagcttgctctgaattgaatcacctggggtgactgagtggcggacgggtgagtaacgcgtgggtaacctacctatgacagggggatagcagttggaaacgactgataataccgcataagtgcacagtatcgcatgatacagtgtaaaaaactccggtggtcatagatggacccgcgtctgattagctagttggtgaggtaacggcccaccaaggcgacgatcagtagccgacttgagagagtgatcggccacattgggactgagacacggcccaaactcctacgggaggcagcagtagggaatattgcacaatgggggaaaccctgatgcagcgacgccgcgtgaaggatgaagtatttcggtatgtaaacttctatcagcaaggaagaaaatgacggtacttga

SEQ ID NO: 8362 - DNA, 490 bp, unidentified
  misc_feature 1..490: note = Ascusbbf_211958, encodes 16S rRNA
  source 1..490: mol_type = genomic DNA
agagtttgatcctggctcaggatgaacgctggcggcgtgcctaatacatgcaagtcgaacggagtacttcggtacttagtggcgaacgggtgagtaacacataaacaatctaccctgaagactgggataacggttggaaacgaccgctaataccggataggtaacttaaaggcatctttgagttattaaagttgggatacaacactgcaggatgagtttatgtcgcattagctagttggcggggcaacggcccaccaaggcgatgatgcgtagccggtctgagaggatgaacggccacattgggactgagacacggcccagactcctacgggaggcagcagtagggaattttcggcaatgggggaaaccctgaccgagcaacgccgcgtgaacgatgaaggtctttggattgtaaagttctgttacgagggaagaatggtttgtgtagggaatgacacaaacagggacggtacctcgccagaaagccacg

SEQ ID NO: 8363 - DNA, 490 bp, unidentified
  misc_feature 1..490: note = Ascusbbf_660354, encodes 16S rRNA
  source 1..490: mol_type = genomic DNA
agagtttgatcctggctcaggacgaacgctggcggcgtgcctaacacatgcaagtcgaacggagctgttttggacggagacttcggtcaaagaccatgacagcttagtggcggacgggtgagtaacgcgtgagtaacctgccgttcagagggggacaacagttggaaacgactgctaataccgcataatgtatataggaggcatcttctgtataccaaaggagcaatccgctgaatgatggactcgcgtccgattagatagttggtggggtaacggcctaccaagtcgacgatcggtagccggactgagaggttgatcggccacattgggactgagacacggcccagactcctacgggaggcagcagtgggggatattgcacaatggaggaaactctgatgcagcaacgccgcgtgagggaagaaggtcttcggattgtaaacctttgtttttggtgacgaacaaatgacggtagccaaagaggaagcca

SEQ ID NO: 8364 - DNA, 490 bp, unidentified
  misc_feature 1..490: note = Ascusbbf_225805, encodes 16S rRNA
  source 1..490: mol_type = genomic DNA
agagtttgatcatggctcagaacgaacgctggcggcatggattaggcatgcaagttgaacgaactccttcgggagtgagtagcgaaagggtgaggaacgcgtgagtaatctgcccataagttgggaacaacagttggaaacgactgctaataccgaatgtggctattgacccgcatgggtttttggctaaagatttatcgcttatggatgagctcgcgtcccattagctagttggtgaggtaacggcccaccaaggctacgatgggtagctggtctgagaggatggtcagccacactgggactgagacactgcccagactcctacgggaggctgcagtcgagaatcttgggcaatgcgcgaaagcgtgacccagcaatgccgcgtgcatgatgaaggccctcgggtcgtaaaatgctgtctcccgtgacgaataatgacggtagcggggaaggaagccacggctaactacgtgccagcagccgcggtaat

SEQ ID NO: 8365 - DNA, 490 bp, unidentified
  misc_feature 1..490: note = Ascusbbf_149523, encodes 16S rRNA
  source 1..490: mol_type = genomic DNA
agagtttgatcctggctcagaacgaacgctggcggcgcgtcttaagcatgcaagtcgagcgggattgtccagcttgctggacatgagagcggcggactggcgaggagcgcgtgggcgacgcgccccccggactggaacagcccgtggaaacacggggtaatgccggacggcatgggaggcttggaggccttccatcaaaggggcttcggccccgccgggggaacggcccgcgtcccatcagcttgttggcggtgcaagggaccaccaaggctacgacgggtgtccggcctgagagggcgatcggacgcattgggactgagatacggcccagactcctacgggaggcagcagctaagaatattccgcaatgggcgaaagcctgacggagcgacgccgcgtggacgatggaggccggaaggttgtaaagtccttttgggaaagaagaagaagccggggaggaaacgccccggcggcgacggtatttcgcgaa

SEQ ID NO: 8366 - DNA, 490 bp, unidentified
  misc_feature 1..490: note = Ascusbbf_712553, encodes 16S rRNA
  source 1..490: mol_type = genomic DNA
agagtttgatcatggctcaggatgaacgctggcggcgtgcctaacacatgcaagtcgaacgggccccagcggcggaactttttcggaggtgaagccgcgaagggctagtggcggacgggtgagtaacgcgtgggcaatctgccctgcaccgggggacaacagggggaaacccctgctaataccgcataagcgcacggcatggcatcatgcagtgtgaaaagctccggcggtgcgggatgagcccgcgtccgattagctggttggcggtgcagcggaccaccaaggcgacgatcggtagccggcctgagagggcggacggccacattgggactgagacacggcccagactcctgcgggaggcagcagtgggggatattgcacaatggggggaaccctgatgcagcgacgccgcgtgggtgaagaagcatttcggtgcgtaaagccctatcgacagggacgataatgacggtacctgggtaagaagccccgg

SEQ ID NO: 8367 - DNA, 490 bp, unidentified
  misc_feature 1..490: note = Ascusbbf_1882268, encodes 16S rRNA
  source 1..490: mol_type = genomic DNA
agagtttgatcctggctcaggacgaacgctggcggcgtgcctaatacatgcaagtcgaacgaactgacgctggaacttgttccagttgacgtgagtggcgaacgggtgagtaacacgtggggaacctacccttcagcgggggataaccgtcggaaacgatggctaataccgcataacactttgtaccacatggtacaaagttaaaagacggcttcggctgtcactgaaggatggtcccgcggtgcattagctagttggtagggtaaaggcctaccaaggccatgatgcatagccgacctgagagggtgatcggccacactgggactgagacacggcccagactcctacgggaggcagcagtagggaatcttccgcaatggacgaaagtctgacggagcaacgccgcgtgtgtgaagaaggtcttcggatcgtaaagcactgttattagagaagaacaaccggtagagtaactgttaccggcttgacggta

SEQ ID NO: 8368 - DNA, 489 bp, unidentified
  misc_feature 1..489: note = Ascusbbf_688748, encodes 16S rRNA
  source 1..489: mol_type = genomic DNA
agagtttgatcatggctcaggacgaacgctggcggcgtgcctaacacatgcaagtcgaacgatccccctcgggggatagtggcggacgggtgagtaacgcgtgaacaatctgccctgtacaaaggaatagcctcgggaaaccgggattaaaaccgtataacactttagtatcgcatgatacagaagtcaaatatttataggtatgggatgagttcgcgtctgattagctagttggtaaggtaaaggcttaccaaggcgacgatcagtagccggcctgagagggtgaacggccacactggaactgagacacggtccagactcctacgggaggcagcagtggggaatattgcacaatggagggaactctgatgcagcgacgccgcgtgagtgaagaaggtcttcggatcgtaaaactctgtccttggtgaagataatgacggtagccaaggaggaagccccggctaactacgtgccagcagccgcggtaat

SEQ ID NO: 8369 - DNA, 490 bp, unidentified
  misc_feature 1..490: note = Ascusbbf_1221355, encodes 16S rRNA
  source 1..490: mol_type = genomic DNA
agagtttgatcctggctcaggatgaacgctggcggcatgcctaatacatgcaagtcgaacggatggataagtacttgtactttgaagtcagtggcgaacgggtgagtaatacatgaacaacctacccctttgactgggataacgttctgaaaagaacgctaataccggataggtgatcttaaggcatcttgagatcattaaaggtgggctacaccacattgggatgggttcatgtcgcattagttagttggcagggtaacggcctaccaagacgacgatgcgtagccggtctgagaggatgaacggccacattgggactgagacacggcccagactcctacgggaggcagcagtagggaattttcggcaatgggcgcaagcctgaccgagcaatgccgcgtgaacgatgaaggtctttggattgtaaagttctgttgcgagggaagaacattatgtatagggaatgatacataactgacggtacctcgcc

SEQ ID NO: 8370 - DNA, 470 bp, unidentified
  misc_feature 1..470: note = Ascusbbf_1842241, encodes 16S rRNA
  source 1..470: mol_type = genomic DNA
agagtttgatcctggctcagaacgaacgccggcggcaggcttaacacatgcaagtcgagcgaggacttcggtcctagcggcgaacgggtgagtaacgcgtgggaacgtacccctttcttcggaataactcagggaaacttgaactaataccggatacgcccttcgggggaaagatttatcggtgagggatcggcccgcgttggattaggtagttggtggggtaatggcctaccaagccgacgatccatagctggtttgagaggacgatcagccacactgggactgagacacggcccagactcctacgggaggcagcagtggggaatcttggacaatgggggaaaccctgatccagccatgccgcgtgaacgatgaaggccttagggttgtaaagttctttcagcggggaagataatgacggtacccgcagaagaagccccggctaactccgtgccagcagccgcggtaat

SEQ ID NO: 8371 - DNA, 481 bp, unidentified
  misc_feature 1..481: note = Ascusbbf_1304489, encodes 16S rRNA
  source 1..481: mol_type = genomic DNA
agagtttgatcctggctcagaacgaacgctggcggcaggcttaacacatgcaagtcgagcgccccgcaaggggagcggcagacgggtgagtaacgcgtgggaatctaccttttgctacggaataactcagggaaacttgtgctaataccgtatgtgtcccccatagagatatggcgggagaaagatttatcggcaagagatgagcccgcgttggattagctagttggtggggtaaaggcctaccaaggcgacgatccatagctggtctgagaggatgatcagccacactgggactgagacacggcccagactcctacgggaggcagcagtggggaatattggacaatgggcgcaagcctgatccagccatgccgcgtgagtgatgacggtcttaggattgtaaagctctttcaccggtgaagataatgacggtaaccggagaagaagccccggctaacttcgtgccagcagccgcggtaat

SEQ ID NO: 8372 - DNA, 490 bp, unidentified
  misc_feature 1..490: note = Ascusbbf_719954, encodes 16S rRNA
  source 1..490: mol_type = genomic DNA
agagtttgatcctggctcagaatgaacgctggcggcgtggttaagacatgcaagtcgaacgggtttttcagctgtagcaatacaattgaaaagctagtggcgaacgggtgcgtaacacgtgaacaatttaccttttagtgtggaatagcttgtcgaaaggcaaattaataccgcatgtggttgtgatccgcatggttcacatactaaagcttgggaccgcaaggccaggcgctaatcgaggagttcgcggcctatcagctagttggtgaggtaacggctcaccaaggctaagacgggtagctggtctgagaggatggccagccacactggagctgagacacggtccagacacctacgggtggcagcagtttcgaatcattcacaatgggcgaaagcctgatggtgtgacgccgcgtgggggacgaaggttttcggattgtaaacccctgtcaccggggaagaaacgttcaaagttaatagctttgagcct

SEQ ID NO: 8373 - DNA, 490 bp, unidentified
  misc_feature 1..490: note = Ascusbbf_821484, encodes 16S rRNA
  source 1..490: mol_type = genomic DNA
agagtttgatcatggctcaggatgaacgctggcggcgtgcctaatacatgcaagtcgaacgctcgacttttaacaagcttgcttgatttaagaagagagtggcgaacgggtgagtaatacataagtaatctgcccctacaactgggataaccattggaaacgatggctaataccggatagttcaattgatggcatcattgattgattaaagatgggctacatcgagtagggatgagcttatggtgcattagctagttggtaaggtaagagcttaccaaggcgatgatgcatagccgacctgagagggtgaccggccacactgggactgagacacggcccagactcctacgggaggcagcagtagggaattttcggcaatgggggcaaccctgaccgagcgacgccgcgtgagtgaagaaggccttcgggttgtaaagctctgttgtaagggaagaatggtacttgtagggaatgacaagtaattgacggt

SEQ ID NO: 8374 - DNA, 490 bp, unidentified
  misc_feature 1..490: note = Ascusbbf_1478947, encodes 16S rRNA
  source 1..490: mol_type = genomic DNA
agagtttgatcctggctcaggatgaacgctagcggcaggcttaacacatgcaagtcgaggggcagcacgggtagcaatacctggtggcgaccggcgcaagggtgcgtaacgcgtgagcaacatgccctatacagggggataaaccagggaaacttggactaataccccatagcatttatttatggcatcatgaataaattaaagcttcggtggtataggattggctcgcgtgacattagctagatggtgaggtaacggctcaccatggcgatgatgtctaggggttctgagaggaaggccccccacactgggactgagacacggcccagactcctacgggaggcagcagtgaggaatattggacaatggatggaaatctgatccagccatgccgcgtgcaggaagacggccctatgggttgtaaactgcttttatacgggagcaataaggtctacgtgtagactgatgagagtaccgtatgaataagcat

SEQ ID NO: 8375 - DNA, 490 bp, unidentified
  misc_feature 1..490: note = Ascusbbf_955124, encodes 16S rRNA
  source 1..490: mol_type = genomic DNA
agagtttgatcctggctcaggatgaacgctagcggcaggcctaacacatgcaagtcgaggggcagcggggtagcaatactgccggcgaccggcgcacgggtgagtaacgcgtatgtaacctagttcacaaagagggatagccttccgaaagggagattaataccacatataatactgttattgcatgatgatagtatgaaacatttatggatgtgaaatggacatgcgtctgattagatagtaggcggggtaacggcccacctagtcgacgatcagtaggggttctgagagggagatcccccacattggtactgagacagggaccaaactcctacgggaggcagcagtgaggaatattggtcaatggacggaagtctgaaccagccaagtcgcgtgcaggaagacggccctatgggttgtaaactgcttttgtacgagggtaaaaggcgctatgtatagtgttttgaaagtaccgtacgaataaggatcg

SEQ ID NO: 8376 - DNA, 490 bp, unidentified
  misc_feature 1..490: note = Ascusbbf_456457, encodes 16S rRNA
  source 1..490: mol_type = genomic DNA
agagtttgatcatggctcaggacgaacgctggcggcgtgcttaacacatgcaagtcgaacgatgaagctggggcttgctctggtggattagtggcgaacgggtgagtaacacgtgagcaacgtgcccggaactctgggataactaccggaaacggtggctaatactggatatgtgccagggaggcatcttctctggttggaaagagtttttggttccggatcggcttacggcctatcagcttgttggtggggtaatggcctaccaaggcgacgacgggtagccggcctgagagggtgaccggccacactgggactgagacacggcccagactcctacgggaggcagcagtggggaatattgcacaatgggcgaaagcctgatgcagcaacgccgcgtgggggatgacggccttcgggttgtaaacctcttttagtagggaagaagcgtaagtgacggtacctgcagaaaaagcaccggctaactacgtgc

SEQ ID NO: 8377 - DNA, 490 bp, unidentified
  misc_feature 1..490: note = Ascusbbf_1845932, encodes 16S rRNA
  source 1..490: mol_type = genomic DNA
agagtttgatcatggctcagattgaacgctggcggcatgcctaacacatgcaagtcgaacggcagcgcggagagcttgctctctggcggcgagtggcggacgggtgaggaatatgtaggaatctacctagaggagggggataacttggggaaactcaaggtaataccacataagccctacgggggaaagcaggggatcttcggaccttgcgccttatgatgagcctacatcggattagcttgttggtggggtaaaggcctaccaaggcgacgatccgtagctggtctgagaggatgaccagccacactgggactgagacacggcccagactcctacgggaggcagcagtggggaatattggacaatgggcgaaagcctgatccagcaatgccgcgtgtgtgaagaaggccttagggttgtaaagcactttcagtggggaggaagggtttaatgctaatatcattgaatcttgacgctacccacagaagaa

SEQ ID NO: 8378 - DNA, 490 bp, unidentified
  misc_feature 1..490: note = Ascusbbf_953725, encodes 16S rRNA
  source 1..490: mol_type = genomic DNA
agagtttgatcctggctcaggacgaacgctggcggcgtgcctaatacatgcaagtggaacgcacgattaaaccgtagcttgctacacattaatcgtgagtcgcgaacgggtgagtaacgcgtaggtaacctgcctattagcgggggataactattggaaacgatagctaataccgcataggagagatgatcgcatgatcatagtttaaaagatacaactgtatcgctagtagatggacctgcgttgtattagctggttggtaaggtagtggcttaccaaggcaacgatacatagccgacctgagagggtgaccggccacacggggactgagacacggcccagactcctacgggaggcagcagtagggaatcttcggcaatggggggaaccctgaccgagcaacgccgcgtgagtgaagaaggttttcggatcgtaaagctctgttgtcagagacgaacgtatgtgagagtggaaagttcacatagtgacg

SEQ ID NO: 8379 - DNA, 490 bp, unidentified
  misc_feature 1..490: note = Ascusbbf_34145, encodes 16S rRNA
  source 1..490: mol_type = genomic DNA
agagtttgatcatggctcaggataaacgctggcggcgcacataagacatgcaagtcgaacggacttaactcattcttttagattgagagcggttagtggcggactggtgagtaatacgtaagcaacctgcctgttagaggggaacaacagttagaaatgactgctaataccgcatatgccatagataccacatggtatcagtgggaaaggagcaatccgctaacagatgggcttacggctgattagctagttggtggggtaacggcctaccaaggcgacgatcagtagccggactgagaggttcaacggccacattgggactgagatacggcccagactcctacgggaggcagcagtcgggaattttgcgcaatggaggaaactctgacgcagtgacgccgcgtgcaggaagaaggttctaggattgtaaactgctttagacagggaagaaaaaagacagtacctgtagaataagctccggctaactacg

SEQ ID NO: 8380 - DNA, 490 bp, unidentified
  misc_feature 1..490: note = Ascusbbf_723324, encodes 16S rRNA
  source 1..490: mol_type = genomic DNA
agagtttgatcatggctcaggacgaacgctggcggcgtgcttaacacatgcaagtcgaacggacggacacccttcggggtgcgagttagtggcggacgggtgagtaacgcgtgagtaacctgccttggagtggggaataacacagggaaacttgtgctaataccgcataatatcatgagatggcatcttcttatgatcaaagatttattgctccaagatgggctcgcgtccgattagatagttggcggtgtaatggcccaccaagtcgacgatcggtagccggactgagaggttggccggccacattgggactgagacacggcccagactcctacgggaggcagcagtgggaatattaggcaatgggggaaaccctgacctagcgacgccgcgtgaaggatgaaggttttcggattgtaaacttctttggcaggggacgataatgacggtaccctgagaacaagccacggctaactacgtgccagcagcc

SEQ ID NO: 8381 - DNA, 490 bp, unidentified
  misc_feature 1..490: note = Ascusbbf_114457, encodes 16S rRNA
  source 1..490: mol_type = genomic DNA
agagtttgatcatggctcaggatgaacgctagcggcaggcttaacacatgcaagtcgaggggcagcacgtcttcggatggtggcgaccggcgcacgggtgagttacgcgtatgcaatctaccttttactggggcatagcccggggaaacccggattaatatcccatagtaccataacccggcatcgggaattggttaaagccttggcggtaaaagatgagcatgcgtcctattagcttgatggtaaggtaacggcttaccatggctatgataggtaggggtcctgagagggagatcccccacactggtactgagacacggaccagactcctacgggaggcagcagtgaggaatattggacaatgggcgagagcctgatccagccatgccgcgtgcaggaagacggccctatgggttgtaaactgcttttatacgggaagaaacaccctcttgcgagaggacttgacggtaccgtatgaataaggatcggc

SEQ ID NO: 8382 - DNA, 490 bp, unidentified
  misc_feature 1..490: note = Ascusbbf_220237, encodes 16S rRNA
  source 1..490: mol_type = genomic DNA
agagtttgatcatggctcaggacgaacgctggcggcgtgcttaaaacatgcaagtcgaacgggaagttgaaaagcttgctttttaacttctagtggcggacgggtgagtaacgcgtgagcaacctgcctactactggggaataacacagagaaatttgtgctaataccgcataagaccacaggagggcatcctctaggggtcaaaggaagtaattccggtggtagaggggcttgcgtctcattagcttgttggtggggtaacggcctaccaaggcgacgatgagtagccgatctgagaggatgaacggccacactggaactgagaaacggtccagactcctacgggaggcagcagttaggaatattgggcaatggaggaaactctgacccagcaacgccgcgtgaaggatgaaggttttcggattgtaaacttctgatctgagggaaaaagaaaatgatggtacctcaggagaaagccacggctaactac

SEQ ID NO: 8383 - DNA, 490 bp, unidentified
  misc_feature 1..490: note = Ascusbbf_145187, encodes 16S rRNA
  source 1..490: mol_type = genomic DNA
agagtttgatcatggctcaggatgaacgctggcggcgtgcttaacacatgcaagtcgaacgaagcatgagctgaaattttcggatggatgcccatgacttagtggcggacgggtgagtaacgcgtgggtaacctgcctcatgcagggggacaacagctggaaacggctgctaataccgcataagaccccgtgagcgcatgctcaagaggtaaaagatttatcggcatgagatggacccgcgttagattagttagttggtggggtaacggcctaccaagacgacgatctatagccgacctgagagggtgaccggccacattgggactgagacacggcccaaactcctacgggaggcagcagtggggaatattggacaatgggggaaaccctgatccagcgacgccgcgtgagtgaagaagtatttcggtatgtaaagctctatcagcagggaagaagatgacggtacctgcagaagaagccccggctaact

SEQ ID NO: 8384 - DNA, 490 bp, unidentified
  misc_feature 1..490: note = Ascusbbf_1417270, encodes 16S rRNA
  source 1..490: mol_type = genomic DNA
agagtttgatcctggctcaggatgaacgctggcggcgcgcttaacgcatgcaagtcggacggggtgagtaacttcggttatgaattcagtggcggacgggtgagtaacgcgtggataatttgtctttcagtgggggatagctgagagaaatctcaattaataccgcatagtataatttattcgcatgggtgagttattaaaggtgcaaatcgctgagagagaagtctgcgtctgattagctagttggggtggtaatggcacaccaaggcgacgatcagtaatcggtttgagagaatgaacggtcacattgggactgagatacggcccagactcctacgggaggcagcagtggggaatattgcgcaatggaggaaactctgacgcagcgacgccgtgtgaaggatgaaggccttcgggttgtaaacttttatcgattgtgaaaagaagggatggtagcaaagtaagaagctccggctaactacgtgccagc

SEQ ID NO: 8385 - DNA, 490 bp, unidentified
  misc_feature 1..490: note = Ascusbbf_1497557, encodes 16S rRNA
  source 1..490: mol_type = genomic DNA
agagtttgatcctggctcaggacgaacgctggcggcgtgcctaatacatgcaagtcgagcggggttagttagaagcttgcttctaaataacctagcggcggacgggtgagtaacacgtaggcaacctgcccacaagacaggaataactaccggaaacggtagctaatacccgatacatccttttcctgcatgggcgaaggaggaaagacggagcaatctgtcacttgtggatgggcctgcggcgcattagctggttggtggggtaaaggcctaccaaggcgacgacgcgtagccgacctgagagggtgatcggccacactgggactgagacacggcccagactcctacgggaggcagcagtagggaatcttccgcaatgggcgaaagcctgacggagcaacgccgcgtgagtgatgaaggttttcggatcgtaaagctctgttgccagggaagaacgtcttgtagagtaactgctacaagagtgacggta

SEQ ID NO: 8386 - DNA, 490 bp, unidentified
  misc_feature 1..490: note = Ascusbbf_698657, encodes 16S rRNA
  source 1..490: mol_type = genomic DNA
agagtttgatcatggctcagattgaacgctggcggcaggcctaacacatgcaagtcgagcgcgaaagttcttcggaatgagtaaagcggcggacgggtgagtaatgcatgggaatctgcctggtagtgggggacaacgtctcgaaagggacgctaataccgcatacgccctacgggggaaagggggggatcttcggacctctcgctatcagatgagcccatgtcggattagctagttggtggggtaaaggcctaccaaggcgacgatccgtaactggtctgagaggatgatcagtcacactggaactgagacacggtccagactcctacgggaggcagcagtggggaatattggacaatgggcgaaagcctgatccagccatgccgcgtgtgtgaagaaggccttagggttgtaaagcactttcagtggggagaaaggttgtttacctaatacgtaagcaaattgatgttacccacagaagaagcaccgg

SEQ ID NO: 8387 - DNA, 490 bp, unidentified
  misc_feature 1..490: note = Ascusbbf_430580, encodes 16S rRNA
  source 1..490: mol_type = genomic DNA
agagtttgatcctggctcaggatgaacgctagcggcaggcttaacacatgcaagtcgaggggtagaggctttcgggccttgagaccggcgcacgggtgcgtaacgcgtatgcaatctgccttgtactgggggatagcccagagaaatttggattaataccccatagtattttcggttggcatcaactgattattaaagtttttcggtacaagatgagcatgcgtcccattagctagttggtatggtaacggcataccaaggctacgatgggtaggggtcctgagagggagatcccccacactggtactgagacacggaccagactcctacgggaggcagcagtgaggaatattggtcaatggtcgcaagactgaaccagccatgccgcgtgcaggatgaagcatctatggtgtgtaaactgcttttgtacgggaagaaacactgctacgtgtagcagcttgacggtaccgtaagaataaggatcggctaa

SEQ ID NO: 8388 - DNA, 490 bp, unidentified
  misc_feature 1..490: note = Ascusbbf_1281250, encodes 16S rRNA
  source 1..490: mol_type = genomic DNA
agagtttgatcctggctcaggacgaacgctggcggcgtgcctaacacatgcaagtcgagcgaagtgattttaaggaaattttcggatggaattaaaattatcttagcggcggacgggtgagtaacgcgtgagaaacctgcctttcacaaagggatagcctcgggaaactgggattaataccatatgatacttttacttcgcatgaagcaaaagttaaagcgtaaagcggtgaaagatggtctcgcgtcccattagttagttggtgaggtaacggctcaccaagaccgcgatgggtagccggcctgagagggtgaacggccacactggaactgagacacggtccagactcctacgggaggcagcagtggggaatattgcacaatggaggaaactctgatgcagcgacgccgcgtgaacgatgaaggccttcgggtcgtaaagttctgtccttggggacgataatgacggtacccaaggaggaagccccggc

SEQ ID NO: 8389 - DNA, 490 bp, unidentified
  misc_feature 1..490: note = Ascusbbf_254751, encodes 16S rRNA
  source 1..490: mol_type = genomic DNA
agagtttgatcctggctcaggatgaacgctggcggcgtgcttcatacatgcaagtcgaacgtgaagctgacttcggtcagtggaaagtggcggacgggtgagtaatacataggaaatctgcccttaggaaggggataacagtcggaaacgattgctaataccctatacgagcttggttgaaataccaatcttgaaaactccggtgcctaaggatgagcctgtgcctgattagctagttggtggtgtaatggaccaccaaggcgacgatcagtagctggtttgagaggatgatcagccacaatggaactgagacacggtccatactcctacgggaggcagcagtagggaattttgggcaatgggcgaaagcctgacccagcaacgccgcgtgtgtgatgaagcccctaggggtgtaaaacactgtcagtagggaagaaacttgactgtacctacagaggaagcaccggctaactccgtgccagcagccgcg

SEQ ID NO: 8390 - DNA, 490 bp, unidentified
  misc_feature 1..490: note = Ascusbbf_487683, encodes 16S rRNA
  source 1..490: mol_type = genomic DNA
agagtttgatcatggctcaggacgaacgctggcggcgtgcttcatacatgcaagtcgaacgagaagttaccttcgggtaatggatagtggcggacgggtgagtaatgtgtagagaatctgccttcaagagggggatagcagttggaaacgactattaataccccatatgcgcgtagttggaatactattcgtgaaagattaatcgcttgaagatgagtctgcatctgattagctagttgggggtgtaatggaccaccaaggcgacgatcagtagctggtttgagaggatgatcagccacaatgggactgagacacggcccatactcctacgggaggcagcagtagggaattttgcgcaatgggcgaaagcctgacgcagcaacgccgcgtgattgagaagaccttcgggttgtaaagatctgtcagtagggacgaacaatgactgtacctacagaggaagcaccggctaactccgtgccagcagccgcgg

SEQ ID NO: 8391 - DNA, 490 bp, unidentified
  misc_feature 1..490: note = Ascusbbf_1682531, encodes 16S rRNA
  source 1..490: mol_type = genomic DNA
agagtttgatcctggctcaggacgaacgctggcggcgtgcttaacacatgcaagtcgaacggaggatttatttcggtaaatccttagtggcgaacgggtgagtaacgcgtgggcaatctgcccttcagatggggacaacatcccgaaaggggtgctaataccgaatacgatcgtattcccgcatgggattgcgatgaaagatggcctctatttataagctatcgctgaaggatgagcctgcgtctgattagctagttggtggggtaacggcctaccaaggcgatgatcagtagccggtctgagaggatgaacggtcacattgggactgagacacggcccaaactcctacgggaggcagcagtggggaatattccgcaatggacgaaagtctgacggagcaacgccgcgtgagtgatgaaggttttcggactgtaaagctctgttgtttaggacgaaagtgcctgttgcgaacagttacaggtattgacgg

SEQ ID NO: 8392 - DNA, 490 bp, unidentified
  misc_feature 1..490: note = Ascusbbf_719944, encodes 16S rRNA
  source 1..490: mol_type = genomic DNA
agagtttgatcatggctcaggatgaacgctggcggcgtgcctaatacatgcaagtcgaacggagatcttcggatcttagtggcgaacgggtgagtaatacatgaggaacctgccctttagacggggatagctcttggaaacgggaggtaataccggataacagataggaaggcatctacttatcttaaaagggagcttctggcttcgcttaaggatggcctcatggtgcattagctagacggcggggtaacggcccaccgtggcgatgatgcatagccgatctgagaggatgaccggccacattgggactgagacacggcccagactcctacgggaggcagcagtagggaattttcggcaatgggcgaaagcctgaccgagcaacgccgcgtgagtgttaaggccttcgggttgtaaagctctgttgtaagggacgaataacacgattaggaaatgaattgtgaatgacggtaccttaccagaaagccac

SEQ ID NO: 8393 - DNA, 490 bp, unidentified
  misc_feature 1..490: note = Ascusbbf_916039, encodes 16S rRNA
  source 1..490: mol_type = genomic DNA
agagtttgatcctggctcaggatgaacgctggcggcgtgcttaacacatgcaagtcgaacgatgaagcaccagcttgctggtgtggattagcggcgaacgggtgagtaacacgtgagcaacctgccccggacttcgggataacagctggaaacagttgctaataccggatatgcacgagaaccgcatggttacttgtgggaaagatttatcggtccgggaggggctcgcggcctatcagcttgttggtgaggtaatggctcaccaaggcgtcgacgggtagccggcctgagagggtgaccggccacactgggactgagacacggcccagactcctacgggaggcagcagtggggaatattgcacaatgggcgcaagcctgatgcagcaacgccgcgtgggggatgacggccttcgggttgtaaacctcttttagtagggaagaagccttcgggtgacggtacctgcagaaaaagcaccggctaactacgt

SEQ ID NO: 8394 - DNA, 490 bp, unidentified
  misc_feature 1..490: note = Ascusbbf_1665414, encodes 16S rRNA
  source 1..490: mol_type = genomic DNA
agagtttgatcatggctcaggacgaacgctggcggcgtgcttaacacatgcaagttgaacggtactccatggaagcttgctgaagtggattatagtagcggacgggtgagtaatgcatgagaagctgccattgggagggggacaacagctggaaacggctgctaataccccgtatgccggaaggtgaaagggattaatcccgcccgatgaggtgctcatgtcctatcagctggttggtgaggtaacggctcaccaaggcgacgacgggtagccggcctgagagggtgaacggccacactggaactgggacacggtccagactcctacgggaggcagcagtggggaatattgggcaatgggggaaaccctgacccagcgacgccgcgtgagggaagacggccttcgggttgtaaacctcttttgtatgggaagaaggaagtgacggtaccatacgaataagtcccggctaactacgtgccagcagccgcgg

SEQ ID NO: 8395 - DNA, 490 bp, unidentified
  misc_feature 1..490: note = Ascusbbf_1467165, encodes 16S rRNA
  source 1..490: mol_type = genomic DNA
agagtttgatcatggctcaggacgaacgctggcggcgtgcttaacacatgcaagtcgaacggaagtatataagaagcttgcttttaatatactttagtggcgaacgggtgagtaacgcgtgaggacttgtccactccagggggacaacagttggaaacggctgctaataccccataagccttcgggtaaaaggagcaatccgggagaggagagactcgcgtcctatcagctagtaggtgaggtaacggcttacctaggctaagacgggtaaccggactgagaggtcgaacggtcacactggaactgagacacggtccagactcctacgggaggcagcagtggggaatcttgggcaatggggggaaccctgatccagcgacgccgcgtgggtgaagacatccttcgggatttaaagccctgttgtacgggaagatagtgacggtaccgtaccagaaagccccggcaaactacgtgccagcagccgcggtaa

SEQ ID NO: 8396 - DNA, 490 bp, unidentified
  misc_feature 1..490: note = Ascusbbf_125392, encodes 16S rRNA
  source 1..490: mol_type = genomic DNA
agagtttgatcctggctcaggatgaacgctagctacaggcttaacacatgcaagtcgaggggcagcatgaagtttgcttgcaaactttgatggcgaccggcgcacgggtgagtaacgcgtatccaacctgcccattacccggggatagcccgccgaaaggcgaattaatacccgatgtggtcccatgacggcatcagagtgggaccaaagtcttgtcggtaacggatggggatgcgtccgattaggttgttggcggggtaacggcccaccaagcctgcgatcggtaggggttctgagaggaaggtcccccacactggaactgagacacggtccagactcctacgggaggcagcagtgaggaatattggtcaatggtcggaagactgaaccagccaagtagcgtgcaggatgacggccctatgggttgtaaactgcttttatgcgggaataaagtgagggacgtgttcctttttgcatgtaccgcatgaat

SEQ ID NO: 8397 - DNA, 490 bp, unidentified
  misc_feature 1..490: note = Ascusbbf_175343, encodes 16S rRNA
  source 1..490: mol_type = genomic DNA
agagtttgatcatggctcaggatgaacgctggcggcgtgcctaacacatgcaagtcgaacgaagcttgataaatgatttcttcggaatgaattttgatatgacttagtggcggacgggtgagtaacacgtgagcaacctgcctttcagagggggataacggtcggaaacgaccgctaataccgcatgatgtatcgagatggcatcattttgataccaaaggagcaatccgctgaaagatgggctcgcgtctgattagatagttggcggggtaacggcccaccaagtcgacgatcagtagccggactgagaggttgaacggccacattgggactgagatacggcccagactcctacgggaggcagcagtggggaatattgcacaatgggggaaaccctgatgcagcaacgccgcgtggaggacgacggttttcggattgtaaactccttttctttgtgaagaattctgacggtagcaaaggaataagcatc

SEQ ID NO: 8398 - DNA, 488 bp, unidentified
  misc_feature 1..488: note = Ascusbbf_300542, encodes 16S rRNA
  source 1..488: mol_type = genomic DNA
agagtttgatcatggctcagaacgaacgctggcggcaggcttaacacatgcaagttgaacgggatttgtttgtagcttgctataagcaatgagagtagcgcactggtgagtaacacgtgggaacataccttttggtgggggacaacagttggaaacgactgctaataccgcataagccctaagggggaaagatttattgccgaaagattggcccgcggaagattaggtagttggtggggtaaaggcctaccaagccgacgatctatagctggtctgagaggacgaacagccacattggaactgagacacggtccagactcctacgggaggcagcagtgaggaatattgggcaatggaggaaactctgacccagccatgccgcgtgagtgaagaaggttttcgaattgtaaagctctttcgggtgagacgatgatgacggtatcacctaaagaagccccggcaaacttcgtgccagcagccgcggtaat

SEQ ID NO: 8399 - DNA, 490 bp, unidentified
  misc_feature 1..490: note = Ascusbbf_911948, encodes 16S rRNA
  source 1..490: mol_type = genomic DNA
agagtttgatcatggctcaggatgaacgctggcggcgtgcctaacacatgcaagtcgaacggagctgcgacgctgatgatggaagtgcttgcacggaaagaatcttgttgtagcttagtggcggacgggtgagtaacgtgtggataacctggttcatccaggaggatagcagctggaaacggctggtaataccgcataagcgcacagtggggcatcctacggtgtgaaaagatttatcgggatggaatggatccgcatctgattagccagttggcggggtaacggcccaccaaagcgacgatcagtagccggcctgagagggcggacggccacattgggactgagacacggcccagactcctacgggaggcagcagtgggggatattgcacaatggagggaactctgatgcagcgacgccgcgtgggtgaagaagtatttcggtatgtaaagccctatcagcagggaagataatgacggtacctgagtaa

SEQ ID NO: 8400 - DNA, 490 bp, unidentified
  misc_feature 1..490: note = Ascusbbf_298474, encodes 16S rRNA
  source 1..490: mol_type = genomic DNA
agagtttgatcatggctcaggacgaacgctggcggcgtgcctaacacatgcaagtcgaacggagatatttcagattgagatttcggttgattgaagaaatatcttagtggcggacgggtgagtaacgcgtgagtaacctgcccatgagagggggataacgttctgaaaagaacgctaataccgcataacatatttgaatcgcatgatttggatatcaaaggagcaatccgcttatggatggactcgcgtccgattagctggttggcgggataacagcccaccaaggcgacgatcggtagccggactgagaggttgaacggccacattgggactgagacacggcccagactcctacgggaggcagcagtgggggatattgcgcaatgggggaaaccctgacgcagcaacgccgcgtgaatgatgaaggtcttcggattgtaaaattcttttgttgaggacgaaagaaatgacggtactcaacgaataagct

SEQ ID NO: 8401 - DNA, 490 bp, unidentified
  misc_feature 1..490: note = Ascusbbf_128260, encodes 16S rRNA
  source 1..490: mol_type = genomic DNA
agagtttgatcatggctcaggatgaacgctagcggcaggcctaacacatgcaagtcgaacggtaacatgagagcttgctctcgatgacgagtggcgcacgggtgagtaacacgtgtacaacttacctctaactggggcatagcccgaagaaattcggattaataccccataataattgaaattcgcatgtttttcaatttaaaactccggtggttagagatgggtacgcgtcctattagttagttggtgaggtaacggctcaccaagacttcgataggtaggggttctgagaggaagatcccccacactggtactgagacacggaccagactcctacgggaggcagcagtgaggaatattggacaatggacgaaagtctgatccagccatgccgcgtgtaggaagaatgccctctgggttgtaaactacttttatatgggaataaacccctcgacgtgtcgagggctgaatgtaccatacgaataagcac

SEQ ID NO: 8402 - DNA, 490 bp, unidentified
  misc_feature 1..490: note = Ascusbbf_574891, encodes 16S rRNA
  source 1..490: mol_type = genomic DNA
agagtttgatcatggctcaggatgaacgctggcggcgtgcctaacacatgcaagtcgaacggaaagaattcttcggaattctttcagtggcggacgggtgagtaacgcgtgggtaacctgccccatacaggggaacaacagctggaaacggctgctaataccgcataagcgcacagtactgcatggtacagtgtgaaaagatttatcactgtaagatggacccgcgtctgattagccagttggcagggtaacggcctaccaaagcgacgatcagtagccgacctgagagggtgatcggccacattgggactgagacacggcccaaactcctacgggaggcagcagtgggggatattgcacaatggaggaaactctgatgcagccatgccgcgtgtgtgaagaaggccttcgggttgtaaagcactttcggaggggaggaacaaatgacgttaccctcagaagaagcaccggctaactccgtgccagcagc

SEQ ID NO: 8403 - DNA, 490 bp, unidentified
  misc_feature 1..490: note = Ascusbbf_229726, encodes 16S rRNA
  source 1..490: mol_type = genomic DNA
agagtttgatcctggctcaggacgaacgctggcggcgtgcctaacacatgcaagtcgaacggagtttactttttagatttcttcggaatgacgagttgtaaacttagtggcggacgggtgagtaacgcgtgagcaacctgcctttcagagggggacaacagttggaaacgactgctaataccgcataatattaggtttagacatctttacctaatcaaaggagcaatccgctgaaagatgggctcgcgtccgattagatagttggcggggtaacggcccaccaagtcgacgatcggtagccggactgagaggttgatcggccacattgggactgagacacggcccagactcctacgggaggcagcagtgggggatattgcacaatgggcgaaagcctgatgcagcaacgccgcgtgagggaagaaggtcttcggattgtaaacctttgtcctaagtgaagaaacaaatgacggtaacttaggaggaagcc

SEQ ID NO: 8404 - DNA, 490 bp, unidentified
  misc_feature 1..490: note = Ascusbbf_503241, encodes 16S rRNA
  source 1..490: mol_type = genomic DNA
agagtttgatcctggctcaggatgaatgctggcggcgtgcctaacacatgcaagtcgaacgtgaaagcatagcaatatgctggaaagtggcgaacgggtgagtaacacgtgggtaacctgccgcgcagagggggataacgactggaaacggtcgctaataccgcatggtaccacactcatgggaatgagagtggttaaaactttggtgctgcgcgaggggcctgcgaccgattagttagttggtggggtaacggcctaccaagacagtgatcggtagctagtctgagaggatgattagccacacgggaactgagacacggtcccgactcctacggggggcagcagtgaggaatattgcacaatggacgcaagtttgatgcagcaacgccgcgtggaggatgacggtctttggattgtaaactccttttctcagggaagagaatggacggtacctgaggaataagtcacggctaactacgtgccagcagcc

SEQ ID NO: 8405 - DNA, 490 bp, unidentified
  misc_feature 1..490: note = Ascusbbf_559899, encodes 16S rRNA
  source 1..490: mol_type = genomic DNA
agagtttgatcatggctcaggacgaacgctggcggcgtgcctaacacatgcaagtcgaacgaggtccatccttcgggagaagacctagtggcgaacgggtgagtaacacgtgagaaacctgccccggagaccgggataaccgcctgaaaaggtggctaataccggatgtccccattccgccgcatggtggtttgaggaaatggattccgctccgggagggtctcgcggcctatcagctagttggtgaggtaacggctcaccaaggcgtcgacgggtagctggtctgagaggatgatcagccacactgggactgagacacggcccagactcctacgggaggcagcagtggggaatcttgcgcaatgggcgaaagcctggcgcagcaacgccgcgtgggggatgaaggctctcgggttgtaaacccctttcagcagggacgaattttgacggtacctgcagaagaagccccggctaactacgtgccagcagc

SEQ ID NO: 8406 - DNA, 486 bp, unidentified
  misc_feature 1..486: note = Ascusbbf_384010, encodes 16S rRNA
  source 1..486: mol_type = genomic DNA
agagtttgatcatggctcagaatgaacgttggcggcatggattaggcatgcaagtcgtgcgcgaagctcccttcggggagtggaaagcggcgaaagggagagtaacacgtgggtatctgcctccaggtctggaatagcggcgggaaactgccggtaatgccagatgacatctccggatcaaagctccggcgcctggagaggggcccgcgtcctattagcttgttggcggggtaatggcccaccaaggctatgatgggtactgggtgtgagagcatgacccagctcactgggactgagatactgcccagacacctacgggtggctgcagtcgagaatcttcggcaatgggcgcaagcctgaccgagcgatgccgcgtgcgggatgaaggccttcgggttgtaaaccgctgtcgtaggggaggaaatagcaatttgaccgatcctaggaggaagtccgggctaagttcgtgccagcagccgcggtaat

SEQ ID NO: 8407 - DNA, 490 bp, unidentified
  misc_feature 1..490: note = Ascusbbf_1565875, encodes 16S rRNA
  source 1..490: mol_type = genomic DNA
agagtttgatcctggctcagattgaacgctggcggcatgcttaacacatgcaagtcgaacggcagcacggtctagcttgctagactggtggcgagtggcgaacgggtgagtaacgcgtaggaatatgccttaaagtgggggacaacttggggaaactcaagctaataccgcataatatcttcggattaaagctagggaccttcgggcctggcgctttaagattagcctgcgtacgattagctagttggtggggtaagggcctaccaaggcgacgatcgttagctggtctgagaggatgaccagccacactggaactgagacacggtccagactcctacgggaggcagcagtggggaatattggacaatgggggcaaccctgatccagcaatgccgcgtgtgtgaagaaggcctgagggttgtaaagcactttcagtggggaggagggtttataggttaagagctagtaaactggacgttacccacagaag

SEQ ID NO: 8408 - DNA, 490 bp, unidentified
  misc_feature 1..490: note = Ascusbbf_1586953, encodes 16S rRNA
  source 1..490: mol_type = genomic DNA
agagtttgatcatggctcaggacgaacgctggcggcgtgcctaacacatgcaagtcgaacggggtagagagcttcggttttctacttagtggcgaacgggtgagtaacgcgtgaagaacctgccttccagtgggggacaacagttggaaacgactgctaataccgcatgacacttctgaggggcatcccttagaagtcaaagctttatgtgctggaagatggcttcgcgtctgattagctagatggcggggtaacggcccaccatggcgacgatcagtagccggtctgagaggatgaacggccacattgggactgagatacggcccagactcctacgggaggcagcagtggggaatattgggcaatgggggaaaccctgacccagcaacgccgcgtgaaggaagaaggccttcgggttgtaaacttcttttaccagggacgaaggacgtgacggtacctggagaaaaagcaacggctaactacgtgccag

SEQ ID NO: 8409 - DNA, 490 bp, unidentified
  misc_feature 1..490: note = Ascusbbf_1512103, encodes 16S rRNA
  source 1..490: mol_type = genomic DNA
agagtttgatcatggctcaggatgaacgctggcggcgtgcctaatacatgcaagtcgaacgatgaagttccttcgggaacggattagtggcgaacgggtgagtaacacgtgaacaatctacctctttgactgggataccaatctgaaaagattgctaataccggataggtaccgggagggcatcctccttgtattaaagatgcgtttgcatcacattgagatgagttcacgtcgcattagttagttggtgaggtaacggcccaccaagacgatgatgcgtagccgatctgagaggatgaccggccacattgggactgagacacggcccagactcctacgggaggcagcagtagggaattttcggcaatgggcgcaagcctgaccgagcaacgccgcgtgaacgatgaaggtctttggattgtaaagttctgttacgagggaagaacagttggtataggaaatgatatcaacctgacggtacctcgccaga

SEQ ID NO: 8410 - DNA, 490 bp, unidentified
  misc_feature 1..490: note = Ascusbbf_1138143, encodes 16S rRNA
  source 1..490: mol_type = genomic DNA
agagtttgatcctggctcaggatgaacgctggcggcgtgcctaacacatgcaagtcgaacggagtgtagacgctgtgcgaagaagtgcttgcacggattcaaacttgtctatacttagtggcggacgggtgagtaacgcgtggaaaacctgcctcatacagggggataacaggaagaaattcctgctaataccgcatgagcgcacgaagggacatccctatgtgtgaaaagattttatcggtatgagatggttccgcgtctgattagccagttggcggggtaacggcccaccaaagcgacgatcagtagccggcctgagagggcggacggccacattgggactgagacacggcccagactcctacgggaggcagcagtgggggatattgcacaatggaggcaactctgatgcagcgacgccgcgtgggtgaagaagttattcgtaatgtaaagccctatcagcagggaagataatgacggtacctgacta

SEQ ID NO: 8411 - DNA, 490 bp, unidentified
  misc_feature 1..490: note = Ascusbbf_1262580, encodes 16S rRNA
  source 1..490: mol_type = genomic DNA
agagtttgatcatggctcaggatgaacgctagcggcaggcctaacacatgcaagtcgaggggtagaagttacttgcaactttgagaccggcgcacgggtgcgtaacgcgtatgcaatctaccttgtactatgggatagcccggagaaatccggattaataccgtatagaatagttaaatggcatcataagactattaaagatttatcggtacaagatgagcatgcgtcccattagttagttggtgtggtaacggcataccaagacgatgatgggtaggggtcctgagagggagatcccccacactggtactgagacacggaccagactcctacgggaggcagcagtgaggaatattggtcaatggaggcaactctgaaccagccatgccgcgtgcaggaagaatgtcctatggattgtaaactgcttttgtacgggaagaaaaagtgttacgtgtaacatattgacggtaccgtaagaataaggatcggc

SEQ ID NO: 8412 - DNA, 490 bp, unidentified
  misc_feature 1..490: note = Ascusbbf_136919, encodes 16S rRNA
  source 1..490: mol_type = genomic DNA
agagtttgatcatggctcaggacaaacgctggcggcgtgcctaacacatgcaagtcgaacgaagcacattggaaagaggcttcggccaatggaaaatgtgacttagtggcggacgggtgagtaatgcatgagcaacctgccctggagagggggacaacagctggaaacggctgctaataccgcatgaagttgtcgggaggcatctcctgacaaccaaagatttatcgctctgggatgggctcatgtctgattagttagttggcggggtaacggcccaccaagactacgatcagtagccggactgagaggttgaacggccacattgggactgagatacggcccagactcctacgggaggcagcagtggggaatattgggcaatgggcgcaagcctgacccagcaacgccgcgtgaaggaagaaggctttcgggttgtaaacttcttttatcagggacgaagaaagtgacggtacctgatgaataagccacg

SEQ ID NO: 8413 - DNA, 486 bp, unidentified
  misc_feature 1..486: note = Ascusbbf_14409, encodes 16S rRNA
  source 1..486: mol_type = genomic DNA
agagtttgatcctggctcagaacgaacgctggcggcatgcttaacacatgcaagtcgaacggtgttttctagtacttgtattaggaaacatagtggcaaacgggtgagtaacgcgtgggaatgtaccctttggtattgaataacgtctggaaacggacgctaatacaatataagctcgagagaggaaagagaaatcgctgaaggagtagcccgcgttagattaggtagttggtggggtaatggcctaccaagccaatgatctatagctggtctgagaggatgaacagccacattgggactgagacacggcccagactcctacgggaggcagcagtggggaatattggacaatgggggaaaccctgatccagcgatgccgcgtgagtgatgaaggtcttcggattgtaaagctcttttataggtgaagataatgacggtagcctatgaataagctccggctaactccgtgccagcagccgcggtaat

SEQ ID NO: 8414 - DNA, 490 bp, unidentified
  misc_feature 1..490: note = Ascusbbf_16976, encodes 16S rRNA
  source 1..490: mol_type = genomic DNA
agagtttgatcctggctcagaacgaacgctggcggcaggcttaacacatgcaagttgaacgggatccttaagatagcttgctattttgaggtgagagtagcgcacgggtgagtaacacgtgggaacataccatttagtgtgggataacaattggaaacgattgataataccgcataagccctgagggggaaaggagagattcgctgaatgattggcccgcggaagattaggcagttggtggggtaaaggcctaccaaacctacgatctatagctggtctgagaggacgatcagccacattgggactgagacacggcccaaactcctacgggaggcagcagtgaggaatattgggcaatgggggcaaccctgacccagccatgccgcgtgagtgaagaaggttttcggattgtaaagctctttcggatgtgaagatgatgacggtagcatctaaagaagccccggcaaacttcgtgccagcagccgcggta

SEQ ID NO: 8415 - DNA, 470 bp, unidentified
  misc_feature 1..470: note = Ascusbbf_1514014, encodes 16S rRNA
  source 1..470: mol_type = genomic DNA
agagtttgatcatggctcagagcgaacgctggcggcaggcttaacacatgcaagtcgaacgcatccttcggggtgagtggcagacgggtgagtaacacgtgggaacgtacctctttgtacggaatagcttttggaaacgaaaggtaataccgtatacgcccttttggggaaagatttatcgcagagagatcggcccgcgtctgattagctagttggtgaggtaatggctcaccaaggcgacgatcagtagctggtctgagaggatgatcagccacactgggactgagacacggcccagactcctacgggaggcagcagtggggaatattggacaatgggcgcaagcctgatccagccatgccgcgtgagtgatgaaggccttagggttgtaaagctcttttgtccgggaagataatgactgtaccggaagaataagccccggctaacttcgtgccagcagccgcggtaat

SEQ ID NO: 8416 - DNA, 490 bp, unidentified
  misc_feature 1..490: note = Ascusbbf_1754037, encodes 16S rRNA
  source 1..490: mol_type = genomic DNA
agagtttgatcatggctcaggacgaacgctggcggcgtgcctaatacatgcaagtggaacgcatgattgatactgtagcttgctacaccattaatcatgagtcgcgaacgggtgagtaacgcgtaggtaacctgcctactagcgggggataactattggaaacgatagctaataccgcataagagtttttaacacatgttagaaatttaaaaggagcaaatgcttcactagtagatggacctgcgttgtattagctagttggtaaggtaacggcttaccaaggcgacgatacatagccgacctgagagggtgatcggccacactgggactgagacacggcccagactcctacgggaggcagcagtagggaatcttcggcaatggggggaaccctgaccgagcaacgccgcgtgagtgaagaaggttttcggatcgtaaagctctgttgtaagagaagaacgttgagtagagtggaaagttactcaagtga

SEQ ID NO: 8417 - DNA, 490 bp, unidentified
  misc_feature 1..490: note = Ascusbbf_375412, encodes 16S rRNA
  source 1..490: mol_type = genomic DNA
agagtttgatcatggctcaggatgaacgctggcggcgtgcctaacacatgcaagtcgaacggggacgtcccgccgttgaagcttcggcagagacatgggacatcctagtggcggacgggtgagtaacgcgtgggcaacctgccctgtactgggggatagcagctggaaacggctggtaataccgcataagcgcacagtgtcgcatgacacagtgtgaaaagctccgacggtacaggatgggcccgcgtccgattagccagttggcggggtaacggcccaccaaagcgacgatcggtagccggcctgagagggcggacggccacattgggactgagacacggcccagactcctacgggaggcagcagtgggggatattgcacaatggggggaaccctgatgcagcgacgccgcgtgggtgaagaagtatttcggtatgtaaagccctatcggcagggacgacgatgacggtacctgactaagaagccccgg

SEQ ID NO: 8418 - DNA, 490 bp, unidentified
  misc_feature 1..490: note = Ascusbbf_718119, encodes 16S rRNA
  source 1..490: mol_type = genomic DNA
agagtttgatcctggctcaggatgaacgctagcggcaggcctaatacatgcaagtcgagcggtaagttgcggagtaatccaagacctagagcggcgtacgggtgcgtaacgcgtatgcaacctacctcatacagggggatagcccggagaaatctggattaataccccatagcacagcacaagggcatctgcgagctgttaaagattcatcggtatgagatgggcatgcgtctgattagctagttggcggtgtaacggaccaccaaggcgacgatcagtaggggttctgagaggaaggtcccccacactggcactgagatacgggccagactcctacgggaggcagcagtagggaatattgggcaatggacgagagtctgacccagccatgccgcgtgcaggaagacggcgttctgcgttgtaaactgcttttatctgggaagaaaaagtccatgcgtggaaaattgccggtaccagatgaataagcacc

SEQ ID NO: 8419 - DNA, 361 bp, unidentified
  misc_feature 1..361: note = Ascusbbf_520815, encodes 16S rRNA
  source 1..361: mol_type = genomic DNA
agagtttgatcatggctcaggacgaacgctggcggcgtgcctaacacatgcaagtcgaacggagtgaaagtagcttgctactggaacttagtggcggacgggtgagtaacacgtgagtaacctgcctttcagaggggaataatgtctggaaacggacactaataccgcataacatattttgatcgcatgattgagatatcaaaggagcaatccgctgaaagatggactcgcgtctgattagccagttggcggggtaacggcccaccaaagcgacgatcagtagccggactgagaggttgaacggccacattgggactgagacacggcccagactcctacgggagccagcagccgcggtaat

SEQ ID NO: 8420 - DNA, 490 bp, unidentified
  misc_feature 1..490: note = Ascusbbf_99105, encodes 16S rRNA
  source 1..490: mol_type = genomic DNA
agagtttgatcatggctcagattgaacgctggcggcaggcctaacacatgcaagtcgagcggtaacagagagaagcttgcttctctgctgacgagcggcggacgggtgagtaatgcctgggaaattgccctgatgtgggggataaccattggaaacgatggctaataccgcatgatgctttcgagccaaagagggggaccttcgggcctctcgcgtcaggatatgcccaggtgggattagctagttggtggggtaaaggctcaccaaggcgacgatccctagctggtctgagaggatgatcagccacactgggactgagacacggcccagactcctacgggaggcagcagtggggaatattgcacaatgggcgcaagcctgatgcagccatgccgcgtgtatgaagaaggccttcgggttgtaaagtactttcagtggtgaggaagggagtgtggttaatagccatattctttgacgttagccacagaag

SEQ ID NO: 8421 - DNA, 490 bp, unidentified
  misc_feature 1..490: note = Ascusbbf_316195, encodes 16S rRNA
  source 1..490: mol_type = genomic DNA
agagtttgatcctggctcaggacgaacgctggcggcgtgcctaatacatgcaagtcgagcgaactctggtaactgaacgatggtgcttgcaccggagtgatgatacatttgagtgagcggcggatgggtgagtaacacgtgggtaacctgccctaaagtgggggataacatctggaaacaggtgctaataccgcataacaacatttaccacatggtttatgtttgaaagatggttctgctatcgctttaggatggacccgcggcgtattagctagttggtgaggtaacggctcaccaaggcagtgatacgtagccgacctgagagggtaatcggccacattgggactgagacacggcccaaactcctacgggaggcagcagtagggaatcttccacaatggacgaaagtctgatggagcaacgccgcgtgagtgaagaaggttttcggatcgtaaaactctgttgttgaagaagaacatgcgtgagagta

SEQ ID NO: 8422 - DNA, 490 bp, unidentified
  misc_feature 1..490: note = Ascusbbf_461051, encodes 16S rRNA
  source 1..490: mol_type = genomic DNA
agagtttgatcatggctcaggacgaacgctggcggcgtgcctaacacatgcaagtcgagcggagccaatcgacggagcccttcggggcaaagatgaggaagcttagcggcggacgggtgagtaacgcgtgagtaacctgcccataagagggggataacacagagaaatttgtgctaataccgcatacagagtgaataccgcatggtgaacacttgaaagatttatcgcttatggatggactcgcgtctgattagatagttggtgaggtaacggctcaccaagtcgacgatcagtagccgaactgagaggttgatcggccacattgggactgagacacggcccagactcctacgggaggcagcagtgggggatattgcgcaatggggggaaccctgacgcagcaacgccgcgtgaaggaagaaggccttcgggttgtaaacttttgttgcaagggaagaaagaaatgacggtaccttgtgaggaagccacg

SEQ ID NO: 8423 - DNA, 470 bp, unidentified
  misc_feature 1..470: note = Ascusbbf_229391, encodes 16S rRNA
  source 1..470: mol_type = genomic DNA
agagtttgatcatggctcagagcgaacgctggcggcaggcttaacacatgcaagtcgaacgggcacttcggtgtcagtggcagacgggtgagtaacacgtgggaacgtacctcttggttcggaacaacacagggaaacttgtgctaataccggataagcccttacggggaaagatttatcgccgagagatcggcccgcgtctgattagctagttggtagggtaacggcctaccaaggcgacgatcagtagctggtctgagaggatgatcagccacattgggactgagacacggcccaaactcctacgggaggcagcagtggggaatattggacaatgggggcaaccctgatccagccatgccgcgtgagtgatgaaggccctagggttgtaaagctcttttgtgcgggaagataatgacggtaccgcaagaataagccccggctaacttcgtgccagcagccgcggtaat

SEQ ID NO: 8424 - DNA, 490 bp, unidentified
  misc_feature 1..490: note = Ascusbbf_1461923, encodes 16S rRNA
  source 1..490: mol_type = genomic DNA
agagtttgatcctggctcaggatgaacgctagctacaggcttaacacatgcaagtcgaggggcagcgcagtgtagcaatacatgggcggcgaccggcgcacgggtgcgtaacgcgtatccaaccttcccgatactcttggatagccttccgaaagggagattaatacaagatggtgtttcactttcgcatgttattgaaactaaagatttatcggtatcggatggggatgcgtgacattagatagtaggcggggtaacggcccacctagtctacgatgtctaggggttctgagaggaaggtcccccacactggaactgagacacggtccagactcctacgggaggcagcagtgaggaatattggtcaatggtcggaagactgaaccagccaagtagcgtgaaggatgaaggttctatggattgtaaacttcttttatacgggaataaaacctcccacgtgtgggagcttgtatgtaccgtatgaataagc

SEQ ID NO: 8425 - DNA, 490 bp, unidentified
  misc_feature 1..490: note = Ascusbbf_402534, encodes 16S rRNA
  source 1..490: mol_type = genomic DNA
agagtttgatcctggctcaggatgaacgctagctacaggcttaacacatgcaagtcgaacggagtagcaatactcagtggcaaacgggtgagtaacacgtatccaacctaacctctactcgggtatagcctttcgaaaggaagagtaatccctgatgttatatgtgattcacatgcattgcatatcaaagatttatcggtagagggtggggatgcgttccattagatagtcggcggggtaacggcccaccgagtcgatgatggataggggttctgagaggaaggtcccccacattggaactgcgacacggtccaaactcctacgggaggcagcagtgaggaatattggtcaatggccggaaggctgaaccagccaagtagcgtgaaggatgacggccctatgggttgtaaacttcttttttatgggaataacgatagtcacgtgtgactatgtgcatgtaccatacgaataaggatcggctaactccgtg

SEQ ID NO: 8426 - DNA, 490 bp, unidentified
  misc_feature 1..490: note = Ascusbbf_455155, encodes 16S rRNA
  source 1..490: mol_type = genomic DNA
agagtttgatcctggctcagagtgaacgctggcggcgtggttaagacatgcaagtcgagcgagaacaaaagcgtagcaatacgtggatgagaaagcggcgaacgggtgcgtaacacgtaagcaacctgccctaaagacggggatagctcggggaaactcgaattaataccggatgtggttctttaacgcatgttaaagatactaaagcttgagatggcgctttaggaggggcttgcggcctatcagcttgttggtgaggtaaaggctcaccaaggcaaagacgggtagcgggtctgagaggacgatccgccacactggaactgagacacggtccagacacctacgggtggcagcagtttcgaatcattcacaatgggggaaaccctgatggtgcaacgccgcgtgagggatgacggccttcgggttgtaaacctctgtcacacaggactaaacgcgaggttcatagcctcgcttgaattaactgtgagag

SEQ ID NO: 8427 - DNA, 490 bp, unidentified
  misc_feature 1..490: note = Ascusbbf_1104790, encodes 16S rRNA
  source 1..490: mol_type = genomic DNA
agagtttgatcctggctcaggatgaacgctagcgacaggcctaacacatgcaagtcgaggggcagcacaaagagtagcaatacttttggtggcgaccggcgcacgggtgagtaacacgtatgcaacctgcctgtaagcggggaataacccggagaaatccggactaataccgcataacactatgttttcgcatgggaatatagttaaacatttatggcttacagatgggcatgcgtatgattagctagttggtgaggtaacggctcaccaaggcaacgatcattaggggttctgagaggaaggtcccccacactggtactgagacacggaccagactcctacgggaggcagcagtgaggaatattggtcaatgggcgagagcctgaaccagccaagtcgcgtgaaggaagaatgtcctatggattgtaaacctcttttgcaggagaataaagtgcaccacgtgtggtgttttgtatgtaccctgcgaata

SEQ ID NO: 8428 - DNA, 490 bp, unidentified
  misc_feature 1..490: note = Ascusbbf_1027042, encodes 16S rRNA
  source 1..490: mol_type = genomic DNA
agagtttgatcctggctcagattgaacgctggcggcatgctttacacatgcaagtcgaggggcagcgcgagggtagcaatactcttggcggcgaccggcggaagggtgcgtaacgcgtgagcaacatgcccgtatccgggagataaccgatggaaacgtcgactaatatcccataacaacaggtaagacatcttatttgtttgaaagtttcgatggatacggattggctcgcgtgacattagctagacggcggagtaacggcccaccgtggcgacgatgtctaggggttctgagaggaaggtcccccacactggaactgagacacggtccagactcctacgggaggcagcagtgaggaatattggacaatgggcggaagcctgatccagccatgccgcgtgcaggaataaggtcctatggattgtaaactgcttttgttgtggagcaataaggtctacgtgtagactgatgagagtacacagcgaataag

SEQ ID NO: 8429 - DNA, 490 bp, unidentified
  misc_feature 1..490: note = Ascusbbf_859807, encodes 16S rRNA
  source 1..490: mol_type = genomic DNA
agagtttgatcctggctcagattgaacgctagcgggatgctttacacatgcaagtcgaacggcagcacagaggaacttgttccttgggtggcgagtggcggacgggtgagtaatgtatcggaacgtgcccagtagtgggggataactacgcgaaagcgtggctaataccgcatattctctacggaggaaagagggggatcatttgacctctcgctattggagcggccgatattagattagctagttggtggggtaacggcctaccaaggcagtgatctatagctggtttgagaggacgaccagccacactgggactgagacacggcccagactcctacgggaggcagcagtggggaattttcgacaatggggggaaccctgatcgagccatcccgcgtgtgggacgaaggccttcgggttgtaaaccacttttctcaacgaagaaaagtcttaggctaataccttaagatgctgacggtagttgaggaat

SEQ ID NO: 8430 - DNA, 490 bp, unidentified
  misc_feature 1..490: note = Ascusbbf_1169515, encodes 16S rRNA
  source 1..490: mol_type = genomic DNA
agagtttgatcatggctcaggacgaacgctggcggcgcgcttaacacatgcaagtcgaacgaggtccatccagtcgcaagaccggtgaagacctagtggcgaacgggtgagtaacacgtgagaaacctaccccgaagaccgggataaccagccgaaaggctggctaataccggatgccttcataacgtcgaatggcgatttgaagaaatggattccgctttgggagggtctcgcggcctatcagcttgttggtgaggtaacggctcaccaaggcaacgacgggtagctgttctgagaggaagatcagccacactgggactgagacacggcccagactcctacgggaggcagcagtggggaatcttgcgcaatgggcgaaagcctgacgcagcgacgccgcgtgcgggaagacggccttcgggttgtaaaccgctttcagcagggacgaaattgacggtacctgcagaagaagctccggccaactacgtgc

SEQ ID NO: 8431 - DNA, 490 bp, unidentified
  misc_feature 1..490: note = Ascusbbf_1478940, encodes 16S rRNA
  source 1..490: mol_type = genomic DNA
agagtttgatcctggctcaggacgaacgctggcggcgtgcttaacacatgcaagtcgaacgaagcacttacgacggaactcttcggagggaagatgtatttgactgagtggcggacgggtgagtaacgcgtgggtaacctgccccatagagggggacaacagttggaaacgactgctaataccgcatagtaaggaggaaccgcatgatttcttcttgaaagcattagtgctatgggatggacccgcgtctgattagctagttggtgaggtaacggcccaccaaggcgacgatcagtagccggcttgagagagtgaacggccacattgggactgagacacggcccaaactcctacgggaggcagcagtggggaatattgcacaatgggcgaaagcctgatgcagcgacgccgcgtgagcgaagaagtatttcggtatgtaaagctctatcagcagggaagaagaatgacggtacctgactaagaagccccg

SEQ ID NO: 8432 - DNA, 490 bp, unidentified
  misc_feature 1..490: note = Ascusbbf_1154165, encodes 16S rRNA
  source 1..490: mol_type = genomic DNA
agagtttgatcatggctcaggatgaacgctagcgacaggcttaacacatgcaagtcgaggggcagcgcgatggtagcaatactattggcggcgaccggcgcactggtgagtaacacgtatgcgacctgccccggacagggggataaacccgggaaactgggcctaataccccatatgccctaaggatgcatgtcctttgggtgaaagatccgtcggtccgggatgggcatgcggcgcattagcttgttggcggggtaacggcccaccaaggcgacgatgcgtaggggttctgagaggaaggtcccccacattggaactgagacacggtccaaactcctacgggaggcagcagtgaggaatattggtcaatggtcggaagactgaaccagccaagtagcgtgaaggatgactgccctacgggttgtaaacttcttttatgcgggaataaagtgccccacgcgtggggtattgcatgtaccgcgtgaataag

SEQ ID NO: 8433 - DNA, 490 bp, unidentified
  misc_feature 1..490: note = Ascusbbf_182001, encodes 16S rRNA
  source 1..490: mol_type = genomic DNA
agagtttgatcatggctcagattgaacgctggcggcaggcttaacacatgcaagtcgagcggtaacagggggagcttgctccctgctgacgagcggcggacgggtgagtaatgcataggaatctgcccagtagtgggggatagcccggggaaacccggattaataccgcatacgccctttgggggaaagcaggggatcttcggaccttgcgctattggatgagcctatgtcggattagctagttggtggggtaaaggcctaccaaggcgacgatccgtagctggtctgagaggatgatcagccacatcgggactgagacacggcccgaactcctacgggaggcagcagtggggaatattggacaatgggggcaaccctgatccagccatgccgcgtgtgtgaagaaggctttcgggttgtaaagcactttcagtgaggaggaaaacctttgggttaatacccctgaggcttgacgttactcacagaagaa

SEQ ID NO: 8434 - DNA, 490 bp, unidentified
  misc_feature 1..490: note = Ascusbbf_1596826, encodes 16S rRNA
  source 1..490: mol_type = genomic DNA
agagtttgatcatggctcagattgaacgctggcggcatgcctaacacatgcaagtcgaacggcagcgcggacttcggtctggcggcgagtggcggacgggtgaggaatacatgggaatctgcccagtcgtgggggataacgtagggaaacttacgctaataccgcatacgacggcgacgtgaaagtgggggaccgcaaggcctcacgcgattggatgagcccatgtcggattagctagttggcggggtaaaggcccaccaaggcgacgatccgtagctggtctgagaggatgatcagccacactggaactgagacacggtccagactcctacgggaggcagcagtggggaatattggacaatgggcgcaagcctgatccagcaatgccgcgtgggtgaagaaggccttcgggttgtaaagccctttttgtacgggaagaaagcttctgggttaataccccgggaggatgacggtaccgtaagaataagca

SEQ ID NO: 8435 - DNA, 490 bp, unidentified
  misc_feature 1..490: note = Ascusbbf_88122, encodes 16S rRNA
  source 1..490: mol_type = genomic DNA
agagtttgatcctggctcaggattaacgctggcggcatgcctaatacatgcaaatcgaacgaagccttttggcttagtggtgaacgggtgagtaacacgtatccaatctacccttaagtttgggataactagtcgaaagattagctaataccggataataacattcacttgcatgagtgaatgtggaaagttgcgtttgcaacgcttttggatgagggtgcgacgtatcagatagttggtgaggtaacggctcaccaagtcattgacgcgtagctgtactgagaggtagaacagccacaatgggactgagacacggcccatactcctacgggaggcagcagtagggaatttttcacaatgggcgaaagccttatgaagcaatgccgcgtgaacgatgaaggtctataagattgtaaagttcttttatttgggaagaaccactaaaataggaaatgattttagtttgactgtaccatttgaataagtatcg

SEQ ID NO: 8436 - DNA, 490 bp, unidentified
  misc_feature 1..490: note = Ascusbbf_641783, encodes 16S rRNA
  source 1..490: mol_type = genomic DNA
agagtttgatcctggctcaggatgaacgctagcgacaggcttaacacatgcaagtcgagggagaaggcgaagggaggcgactcccgaagccggacaccggcgcacgggtgagtaacacgtatgcaacctgcccccggcaggggaataaccggaagaaattccgactaatgccgcgtatactccggaggggcatccctccggggggaaagctgaggcggccggggatgggcatgcgggccattagctagtcggcggggtaacggcccaccgaggcaacgatggctaggggttctgagaggaaggtcccccacactggtactgagacacggaccagactcctacgggaggcagcagtgaggaatattggtcaatgggcggaagcctgaaccagccaagtcgcgtgagggaagaaggtcctaaggattgcagacctcttttgccggggagcaacgggcgttctgaggggcgccgtgagagtacccggagaaaa

SEQ ID NO: 8437 - DNA, 481 bp, unidentified
  misc_feature 1..481: note = Ascusbbf_240904, encodes 16S rRNA
  source 1..481: mol_type = genomic DNA
agagtttgatcctggctcagaacgaacgctggcggcaggcctaacacatgcaagtcgaacgaggtgctttcttcggaaagttacctagtggcggacgggtgcgtaacacgtgggaatctaccttatagtggggaataacttctggaaacgggagctaataccccatacgcccttcgggggaaagatttatcgctataagatgagcccgcggtggattaggtagttggtgaggtaaaggctcaccaagccgatgatccatagctggtttgagagaatgaccagccacactgggactgagacacggcccagactcctacgggaggcagcagtggggaatcttagacaatgggggcaaccctgatctagccatgccgcgtgagtgaagaaggccttagggttgtaaagctctttcacctgtgaggataatgacagtagcaggataagaaggaccggctaactccgtgccagcagccgcggtaat

SEQ ID NO: 8438 - DNA, 490 bp, unidentified
  misc_feature 1..490: note = Ascusbbf_1340910, encodes 16S rRNA
  source 1..490: mol_type = genomic DNA
agagtttgatcctggctcaggatgaacgctggcggcatgcctaagacatgcaagtcgaacgaagtggcccattgaatatggagtacttgtacaaaatatgatttggaatttccacttagtggcagacgggtgagtaacacgtaagtaacctaccttaaagactgggataacgtttggaaacgaaagctaataccagataattcatttttagaaaactagaaatgctaaaagaagcgtttgcttcactttaagatgggcttgcggcgtattaactagttggtggggtaatgtcctaccaagggggcggatgggtcgccgggcggagaggcacatcggccgcattgagactgagacacggcccaaactcctacgggaggcagcagttaggaatattcgtcaatgggggaaaccctgaacgagcaatgccgcgtgagtgatgacggtcttatagattgtaaaactctgttgtaaaggaagaaccctcactata

SEQ ID NO: 8439 - DNA, 490 bp, unidentified
  misc_feature 1..490: note = Ascusbbf_1323707, encodes 16S rRNA
  source 1..490: mol_type = genomic DNA
agagtttgatcctagctcaggacgaacgctggcggcatgcttagcacatgcaagtcgaacggactgattccttcgggatgaaagttagtggcgaacgggtgagtaatgtatgagcaacctgcctctatcaacgggataacagttggaaacgactgctaatacggtataagaccacggcaccgcatgatgctgcggtaaacgatttttcggataaatatgggctcatatcccattagctagttggtgagataacagcccaccaaggcgtggatgggtagcagagctgagaggctgatcggccccattgggactgaaaaccggcccagactcctacgggaggcagcagtggggaatattgggcaatggaggcaactctgaaccagcaatgccgcgtgagtgatgaaggtaattttattgtaaagctcttttcccaggaacgaataaagatgacggtacctgaggaataagccccggctaactacgtgccagc

SEQ ID NO: 8440 - DNA, 490 bp, unidentified
  misc_feature 1..490: note = Ascusbbf_594162, encodes 16S rRNA
  source 1..490: mol_type = genomic DNA
agagtttgatcctggctcaggacgaacgctggcggcgtgcctaatacatgcaagtcgaacggtttagttccaagaggcttgccttttggaactagacagtggcggacgggtgagtaacacgtaggcaacctacctgtcaaaccgggataacctcgggaaaccgaagctaaacccggataagctcctttttcgcatgaagggggagtgaaaaggtgcgacctgatgacagatgggcctgcggcgcattagctagtaggtagggtaacggcctacctaggcgatgatgcgtagccgacctgagagggcgtacggccacactgggactgagatacggcccagactcctacgggaggcagcagtagggaatcttcggcaatgggcgaaagcctgaccgagcaacgccgcgtgagtgaggaaggccttcgggttgtaaaactctgttgtttgggaagaagggaaagggtaggacccttaggtgacggtaccaaac

SEQ ID NO: 8441 - DNA, 474 bp, unidentified
  misc_feature 1..474: note = Ascusbbf_502443, encodes 16S rRNA
  source 1..474: mol_type = genomic DNA
agagtttgatcctggctcagagtgaacgctggcggcatgcttaacacatgcaagtcgcacggtcggcttcggtcggcagtggcggacgggtgaggaacgcgtagggatgtgtccaggggtgggggataacgttgggaaactgacgctaataccgcatgtgatctgaggatcaaagccttcgggcgccattggagcaacctgcgtccgattaggtagttggtggggtaatggcctaccaagcctccgatcggtagctggtctgagaggacgaccagccacactgggactgagacacggcccagactcctacgggaggcagcagtggggaatattggacaatgggcgcaagcctgatccagcaatgccgcgtggatgaagaaggtcttcggattgtaaagtcctttcgacggggacgatgatgacggtacccgtagaagaagccccggctaacttcgtgcgagcagccgcggtaat

SEQ ID NO: 8442 - DNA, 490 bp, unidentified
  misc_feature 1..490: note = Ascusbbf_1764731, encodes 16S rRNA
  source 1..490: mol_type = genomic DNA
agagtttgatcctggctcaggatgaacgctggcggcgtacgtaacacatgcaagttgagcgacgacgtttctgaagtggcaacatggaagggacgagcggagcggcggacgggtgagtaagacatgagaagctgtcctgtggcgggggacaacgtctggaaacggacgctaataccccgtaagccgaaaggtgaaagcagcaatgcgccatgggaggtgctcgtggcctatcagctagttggtgaggtaatggctcaccaaggctacgacgggtagccggcctgagagggtgaccggccacactgggactgagatacggcccagactcctacgggaggcagcagtggggaatattgggcaatgggagagatcctgacccagcgacgccgcgtgaatgacgaaggccttcgggtcgtaaagttcttttatgtgggaagaagaaagtgacggtaccacatgaataagccccggctaactacgtgccagcagc

SEQ ID NO: 8443 - DNA, 490 bp, unidentified
  misc_feature 1..490: note = Ascusbbf_617399, encodes 16S rRNA
  source 1..490: mol_type = genomic DNA
agagtttgatcctggctcaggatgaacgctggcggcgtgcctaatacatgcaagtcgaacgagagcgtccttcgggacaatctagtggcgaacgggtgagtaacacgtaggtaacctgccttaaagttgggaataacagttggaaacgactgctaataccgaataggtaattggaaggcatcttctaattattaaaggtccttcgggactgctttaggagggacctgcgctgcattagttagttggtgaggtaacggctcaccaagaccgtgatgcatagccggactgagaggttgaacggccacactgggactgagacacggcccagactcctacgggaggcagcagtagggaatcttcggcaatggggggaaccctgaccgagcaacgccgcgtgaatgaagaagcacttcggtacgtaaaattcttttattagggaagaatgtatgctagaggaaatgctagtatagtgacggtacctaatgaataa

SEQ ID NO: 8444 - DNA, 490 bp, unidentified
  misc_feature 1..490: note = Ascusbbf_617500, encodes 16S rRNA
  source 1..490: mol_type = genomic DNA
agagtttgatcctggctcaggatgaacgctggcggcgtgcttaacacatgcaagtcgaacggagtattccgcccgaggattgaagaagcttgctttggattgactcaactgggatacttagtggcggacgggtgagtaacgcgtgggtaacctaccttacacagggggataacagttagaaatgactgctaataccgcataagcgcacaggatcgcatgattcagtgtgaaaaactccggtggtgtaagatggacccgcgtctgattagctggttggtgaggtaacggcccaccaaggcgacgatcagtagccggcctgagagggtgaacggccacattggaactgagacacggtccaaactcctacgggaggcagcagtggggaatattgcacaatgggggaaaccctgatgcagcgacgccgcgtgagtgaagaagtatttcggtatgtaaagctctatcagcagggaagatcatgacggtacctgac

SEQ ID NO: 8445 - DNA, 490 bp, unidentified
  misc_feature 1..490: note = Ascusbbf_555877, encodes 16S rRNA
  source 1..490: mol_type = genomic DNA
agagtttgatcctggctcagattgaacgctggcggcaggcttaatacatgcaagtcgaacggtaacagtaagagagtttactcttttagctgacgagtggcggacggatgagtaatacctggggagctgcctggatgagggggataccttctggaaacggaagctaataccgcataaaccctgaggggaaaagggagcaatcccgcattcagatgcgcccagatgggattaggcagttggggaggtaacggctcaccaaaccgatgatctctagctggtttgagaggacaatcagccacattggaattgagaaacggaccaaactcctacgggaggcagcagtggggaatattgcacaatgggggaaaccctgatgcagccatgccgcgtgtgtgaagaaggccttcgggttgtaaagcacttttgcattcgaggaagacagcgcgtaaataaacgcgttatttgacgttagagtgtgaataagcaccgg

SEQ ID NO: 8446 - DNA, 490 bp, unidentified
  misc_feature 1..490: note = Ascusbbf_1878032, encodes 16S rRNA
  source 1..490: mol_type = genomic DNA
agagtttgatcctggctcaggatgaacgctggcggcgtgcctaacacatgcaagtcgagcgagaaatcttagaacgaaacttcggtctagtgaagagatggaaagcggcggacgggtgagtaacgcgtaggcaacctgccccatacagagggatagcctcgggaaaccgggattaaaacctcataacaccaaaagtccacatggacctttggccaaagatttatcggtatgggatgggcctgcgtctgattagctagttggtggggtaacggctcaccaaggcaacgatcagtagccgacctgagagggtaatcggccacattggaactgagacacggtccaaactcctacgggaggcagcagtggggaatattgcacaatgggcgaaagcctgatgcagcaacgccgcgtgagcgaagaaggcctttgggtcgtaaagctctgtcctaggggaagaaaaaaatgacggtacccttggaggaagccccgg

SEQ ID NO: 8447 - DNA, 470 bp, unidentified
  misc_feature 1..470: note = Ascusbbf_336309, encodes 16S rRNA
  source 1..470: mol_type = genomic DNA
agagtttgatcatggctcagaacgaacgctggcggcatgcttaacacatgcaagtcgaacgttatcttcggatggcgtggcggacgggtgagtaacacgtgggaacctgcccagaggtacgggataacccagggaaacttgggacaataccgtatgtgacctgagggtgaaagatttatcgcctttggatgggcccgcgtcggattaggtagttggtggggtaaaggcctaccaagccgacgatccgtagctggtctgagaggatgatcagccacactgggactgagacacggcccagactcctacgggaggcagcagtggggaatattggacaatgggcgcaagcctgatccagcaatgccgcgtgagtgatgaaggccttagggttgtaaagctctttcacccacgacgatgatgacggtagtgggagaagaagccccggctaacttcgtgccagcagccgcggtaat

SEQ ID NO: 8448 - DNA, 490 bp, unidentified
  misc_feature 1..490: note = Ascusbbf_1587887, encodes 16S rRNA
  source 1..490: mol_type = genomic DNA
agagtttgatcctggctcaggacgaacgctggcggcgtgcctaatacatgcaagtcgagcggagaatttggagcttgctccagattcttagcggcggacgggtgagtaacacgtgggcaacctgccctgcagatcgggataactccgggaaaccggtgctaataccgaatagtttgtttcacctcctggtgaaacacggaaagacggtttcggctgtcactgcaggatgggcccgcggcgcattagctagttggtggggtaacggcccaccaaggcgacgatgcgtagccgacctgagagggtgatcggccacactgggactgagacacggcccagactcctacgggaggcagcagtagggaatcttccgcaatggacgaaagtctgacggagcaacgccgcgtgagtgacgaaggtttttggatcgtaaaactctgttgtgagggaagaacaagtaccaactaactactggtaccttgacggtacctca

SEQ ID NO: 8449 - DNA, 490 bp, unidentified
  misc_feature 1..490: note = Ascusbbf_1500211, encodes 16S rRNA
  source 1..490: mol_type = genomic DNA
agagtttgatcatggctcagaacgaacgctggcggcatggattaggcatgcaagtcgaacgctcatcttcggatgggagtggcggaagggtgaggaacacgtgaataatctgcccccaagtttggaataactttccgaaaggaaagctaataccgaatgtggttgatttaccgcatggtgaatcaactaaagatttattgcttggggatgagttcgcgtcccattagctagttggtgaggtaacggctcaccaaggccgagatgggtagctggtctgggaggatgatcagccacactgggactgagacactgcccagactcctacgggaggctgcagtcgagaatcttttgcaatgcgcgaaagcgtgacaaagcaatgccgcgtgccggatgaaggtcttcggattgtaaacggctgtcacccgtgacgaaaaatgacggtaacgggagaggaagccacggctaactccgtgccagcagccgcggtaat

SEQ ID NO: 8450 - DNA, 490 bp, unidentified
  misc_feature 1..490: note = Ascusbbf_1883198, encodes 16S rRNA
  source 1..490: mol_type = genomic DNA
agagtttgatcctggctcagagttaacgctggcagcgtgcataacacatgcaagtcgaacggggattaccggtgtagcaatacattggttaattctagtggcagacgggtgagtaatacatagggaatccacctagaagtggggaataactagttgaaagattagctaataccccataatataagaactcggcatcgggttcttcttaaaggtttttcgcttctagacgatcctatggtctatcagcttgttggtagggtaacggcctaccaaggctacgacggatagccggcctgaaagggcgaccggccacaggggcactgagacacgggccccactcctacgggaggcagcagtggggaattttggacaatggacgaaagtctgatccagcaacgctgcgtgaaggacgaaggttttcggattgtaaacttcttttgcaggggaagaaaaaaatgacggtaccctgtgaataagccacggctaacta

SEQ ID NO: 8451 - DNA, 490 bp, unidentified
  misc_feature 1..490: note = Ascusbbf_1496571, encodes 16S rRNA
  source 1..490: mol_type = genomic DNA
agagtttgatcatggctcaggacgaacgctggcggcgtgcctaatacatgcaagtcgagcggagttatgaaggagcttgctccagattaacttagcggcggacgggtgagtaacacgtaggcaacctgcccctatgactgggataactaccggaaacggtagctaataccggataatctcttccttctcctgagggaagaatgaaaggcggagcaatctgccgcttggggatgggcctgcggcgcattagctagttggcggggtaacggcccaccaaggcgacgatgcgtagccgacctgagagggtgaacggccacactgggactgagacacggcccagactcctacgggaggcagcagtagggaatcttccgcaatgggcgacagcctgacggagcaacgccgcgtgagtgatgaaggttttcggatcgtaaagctctgttgccagggaagaacgtccggtagagtaactgctgccggagtgacggta

SEQ ID NO: 8452 - DNA, 488 bp, unidentified
  misc_feature 1..488: note = Ascusbbf_602868, encodes 16S rRNA
  source 1..488: mol_type = genomic DNA
agagtttgatcatggctcagaacgaacgctggcggcaggcttaacacatgcaagtcgaacgccccgcaaggggagtggcagacgggtgagtaacgcgtgggaatctacctagttctacggaacaacagttggaaacgactgctaataccgtatacgccctacgggggaaagatttatcggaattagatgagcccgcgtgagattagctagttggtggggtaatggcctaccaaggcgacgatctctagctggtctgagaggatgatcagccacactgggactgagacacggcccagactcctacgggaggcagcagtgaggaatattggtcaatggacgagagtctgaaccagccaagtagcgtgcaggatgacggccctatgggttgtaaactgcttttatacagggataaagtgcactacgtgtagtgttttgtaggtactgtatgaataaggaccggctaattccgtgccagcagccgcggtaat

SEQ ID NO: 8453 - DNA, 490 bp, unidentified
  misc_feature 1..490: note = Ascusbbf_1097911, encodes 16S rRNA
  source 1..490: mol_type = genomic DNA
agagtttgatcatggctcaggacgaacgctggcggcgtgcttaacacatgcaagtcgaacgggatccattggtgcttgcactgatggtgagagtggcgaacgggtgagtaatacgtgacgaacctgcctcatactttggaatagctcctggaaacgggtggtaatgccgaatgatccgattctccgcatggggggttgggaaagtgttagcggtatgagatggtgtcgcgtcctatcagcttgttggtggggtagtggcctaccaaggcgttgacgggtagccggcctgagagggtgaccggccacattgggactgagatacggcccagactcctacgggaggcagcagtggggaatattgcgcaatggacgaaagtctgacgcagcgacgccgcgtgcgggatgacggccttcgggttgtaaaccgcttttaatagcgagcaagcgtaagtgagtttaactattgaataaggaccggctaactacgtgc

SEQ ID NO: 8454 - DNA, 490 bp, unidentified
  misc_feature 1..490: note = Ascusbbf_321315, encodes 16S rRNA
  source 1..490: mol_type = genomic DNA
agagtttgatcctggctcaggatgaacgctagctacaggcttaacacatgcaagtcgaggggcagcatggagtcagcttgctgactttgatggcgaccggcgcacgggtgcgtaacacgtatccaatctacccatggctcagggatagcctttcgaaagaaagattaatacctgatggtcttacggagagacatctctctgtaagtaaagatttatcggcgatggatgaggatgcgtccgattaggtagtaggcggggtaacggcccaccaaggcgacgatcggtagccggactgagaggttgaacggccacattgggactgagacacggcccagactcctacgggaggcagcagtgggggatattgcgcaatgggggcaaccctgacgcagcaacgccgcgtgaaggatgaaggttttcggattgtaaacttcttttgttagggacgaaaaatgacggtacctaacgaataagctccggctaactacgt

SEQ ID NO: 8455 - DNA, 468 bp, unidentified
  misc_feature 1..468: note = Ascusbbf_1543740, encodes 16S rRNA
  source 1..468: mol_type = genomic DNA
agagtttgatcctggctcagaatgaacgctggcggcaggcctaacacatgcaagtcgagcgacccgcaaggggagcggcaaacgggtgagtaacacgtgggaatctaccttacagtttggaatagccccgggaaactgggagtaataccaaatacggtctacggacgaaagatttatcgctgtaagatgagcccgcgttagattagctagttggtgaggtaatggctcaccaaggctacgatctatagctggtttgagaggatgatcagccacattgggactgagatacggcccaaactcctacgggaggcagcagtgaggaatattggacaatgggcgaaagcctgatccagccatgccgcgtgtgtgatgaaggccctagggttgtaaagcacttttagcagggaagataatgacggtacctgcagaaaaagccccggctaactccgtgccagcagccgcggtaat

SEQ ID NO: 8456 - DNA, 490 bp, unidentified
  misc_feature 1..490: note = Ascusbbf_892407, encodes 16S rRNA
  source 1..490: mol_type = genomic DNA
agagtttgatcctggctcaggacgaacgctggcggcgtgcctaacacatgcaagtcgagcggggtatatttttcggaatatacttagcggcggacgggtgagtaacgcgtgaggaatctgccctatacagaggaatagcctcgggaaaccgggattaaaaccacataacactttagtatcgcatggtacataagtcaaattgaattagaggtataggatgagctcgcgtctgattagctagttggtgaggtaatggctcaccaaggcgacgatcagtagccggcctgagagggtgaacggccacactggaactgagacacggtccagactcctacgggaggcagcagtggggaatattgtacaatggaggaaactctgatgcagcgacgccgcgtgagtgaagaaggtcttcggatcgtaaaactctgtccttggtgaagataatgacggtagccaaggaggaagccccggctaactacgtgccagcagc

SEQ ID NO: 8457 - DNA, 488 bp, unidentified
  misc_feature 1..488: note = Ascusbbf_564442, encodes 16S rRNA
  source 1..488: mol_type = genomic DNA
agagtttgatcctggctcagggtgaacgctagcggtgcgcctaacacatgcaagtcgagcgggagtatttattagcttgctaatagatatgagagcggcgaacgggtgagtaacacgttggtacatgcccccaagtcagggatagcctagtgaaaactagattaataccggatagtctctttggagtaaaaatttattgcttggggagtggcctgcgttctatcagctagttggtgaggtaatagctcaccaaggctatgacggataactggtctgagaggatgatcagtcacaatggaactgagacacggtccatactcttacgggaggcagcagtgaggaatcttccacaatggacgaaagtctgatggagcgacaccgcgtgaaggatgaaggtctaacgattgtaaacttcttttctgaaggagcataatgagagtactttaggaataagggacggctaaatatgtgccagcagccgcggtaat

SEQ ID NO: 8458 - DNA, 490 bp, unidentified
  misc_feature 1..490: note = Ascusbbf_515722, encodes 16S rRNA
  source 1..490: mol_type = genomic DNA
agagtttgatcctggctcaggatgaacgctagctacaggcttaacacatgcaagtcgaggggcatcatggcggttgcttgcaaccgctgatggcgaccggcgcacgggtgagtaacgcgtatccaacctgcccctgtcctcgggatagcccgccgaaaggcggattaataccggatgctgtcacaagacgacatcagattgtgacgaaaggtttttttccggacagggatggggatgcgtccgattaggcaggcggcggggcaacggcccaccgcgccgacgatcggtaggggttctgagaggaaggtcccccacattggaactgagacacggtccaaactcctacgggaggcagcagtgaggaatattggtcaatgggcgatggcctgaaccagccaagtagcgtgagggacgacggccctacgggttgtaaacctctttttcgcggggataaaatgcgggacgtgtcccgccttgcaggtaccgcgtg

SEQ ID NO: 8459 - DNA, 490 bp, unidentified
  misc_feature 1..490: note = Ascusbbf_289457, encodes 16S rRNA
  source 1..490: mol_type = genomic DNA
agagtttgatcatggctcaggatgaacgctggcggcgtgcttaacacatgcaagtcgaacgaagcagcgggaacgaagttttcggactgagatcctgctgacttagtggcggacgggtgagtaacgcgtggataacctgccgtatgcagggggacaacagctggaaacggctgctaataccgcataagcgcacagatgcgcatgcatcagtgtgaaaagtcttggcggcatacgatggatccgcgttggattaggtagttggcggggtaagggcccaccaagccgacgatccatagccggcctgagagggtgaacggccacattgggactgagacacggcccaaactcctacgggaggcagcagtggggaatattgcacaatgggggaaaccctgatgcagcgacgccgcgtgagtgaagaagtatttcggtatgtaaagctctatcagcagggaagaaaatgacggtacctgactaagaagccccggct

SEQ ID NO: 8460 - DNA, 344 bp, unidentified
  misc_feature 1..344: note = Ascusbbf_627979, encodes 16S rRNA
  source 1..344: mol_type = genomic DNA
agagtttgatcatggctcagaacgaacgctggtggcgtgtcttatacatgcaagtcgagcgaggcagcaatgcctagcggcgaacgggtgagtaacgcgtaagcaatctgccccatatcaggaaatacccgtgccaacgcgcggttgatgtccaggagcgtggcttcccgcatgggatgttgacaagagatttatcggtatgggatgagcttgcgtccgattagctagttggcggggcaacggcccaccaaggcgacgatcggtagccggcctgagagggtgatcggccacattgggactgagatacggcccagactcctacgggagccagcagccgcggtaat

SEQ ID NO: 8461 - DNA, 490 bp, unidentified
  misc_feature 1..490: note = Ascusbbf_650321, encodes 16S rRNA
  source 1..490: mol_type = genomic DNA
agagtttgatcatggctcaggataaacgctggcggcgcacataagacatgcaagtcgaacggaagtcgtaggaaaatggattgaagatttatcagattgaagtttttttacaatggctttagtggcggactggtgagtaacgcgtgagcaacctgcctattagaggggaataacagtgagaaatcattgctaataccgcatatgctcacagtatcacatgatacagtgaggaaaggagtaatccgctaatagatgggctcgcgtctgattagctagttggtggggtaacggcttaccaaggcgacgatcagtagccggactgagaggttgaacggccacattgggactgagatacggcccagactcctacgggaggcagcagtcgggaatattgcgcaatggaggaaactctgacgcagtgacgccgcgtatgggaagaaggttttcggattgtaaaccattgtcgttagggaagaagaagtgacagtac

SEQ ID NO: 8462 - DNA, 490 bp, unidentified
  misc_feature 1..490: note = Ascusbbf_335012, encodes 16S rRNA
  source 1..490: mol_type = genomic DNA
agagtttgatcatggctcaggatgaacgctggcggcgtgcttaacacatgcaggtcgaacgaagctcctgaagctgaatcttcggaagaagcggaaggatgactgagtggcggacgggtgagtaacgcgtggggaacctgcccgaaagagggggacaacagttggaaacgactgctaataccgcataagccgacgaggtcgcatgagtttgtcggaaaaggagcaatccgctttcggatggccccgcgtctgattagccggttggcggggtaacggcccaccaaagcgatgatcagtagccggactgagaggttgaacggccacattgggactgagacacggcccaaactcctacgggaggcagcagtggggaatattgcacaatggagggaactctgatgcagcgacgccgcgtgagtgaagaagtgtttcggcatgtaaagctctatcatcggggaagaagatgacggtacccgaataagaagccccg

SEQ ID NO: 8463 - DNA, 490 bp, unidentified
  misc_feature 1..490: note = Ascusbbf_627541, encodes 16S rRNA
  source 1..490: mol_type = genomic DNA
agagtttgatcctggctcagaacgaacgctggcagcgtggattaggcatgcaagtcgaacgggatccgggtgatagcaatattatctggtgagagtggcggattggggaggagcacgtgagcaacctgccctggagatgtggaaaacctctggaaacggaggctaatacagaatgtggcgtccgatggcatcatcggcgcgccgaagggggccgcaaggctcccgctccgggatgggctcgcgcaccatcagctagttggcggggtaacggcccaccaaggcctacggttagctggtctgggaggatgaccagccccactgggactgagatactgcccagactcctacgggaggctgcagtcgaggatcattcgcaatgggcgaaagcctgacgatgcgacgctgcgtggaggatgaaggccttcgggtcgtaaactcctgtcatgggggaagaggcgaggggacccaacacgtcccttagttgactgta

SEQ ID NO: 8464 - DNA, 490 bp, unidentified
  misc_feature 1..490: note = Ascusbbf_498239, encodes 16S rRNA
  source 1..490: mol_type = genomic DNA
agagtttgatcatggctcagattgaacgctggcggcaggcctaacacatgcaagtcgagcggcagcggaaagtagcttgctactttgccggcgagcggcggacgggtgagtaatgtctgggaaactgcccgatggagggggataaccactggaaacggtggctaataccgcataacgtcttcggaccaaagtgggggaccttcgggcctcacaccatcggatgtgcccagatgggattagctagtaggtggggtaatggctcacctaggcgacgatccctagctggtctgagaggatgaccagccacactggaactgagacacggtccagactcctacgggaggcagcagtggggaatattgcacaatgggcgcaagcctgatgcagccatgccgcgtgtgtgaagaaggccttcgggttgtaaagcactttcagcgaggaggaagggtagtgtcttaatacggcattacattgacgttactcgcagaag

SEQ ID NO: 8465 - DNA, 490 bp, unidentified
  misc_feature 1..490: note = Ascusbbf_1484817, encodes 16S rRNA
  source 1..490: mol_type = genomic DNA
agagtttgatcctggctcaggatgaacgctggcggcgtgcttaacacatgcaagtcgaacgaagctcctgaagcagagatttcggtcaaagcggagggaagacttagtggcggacgggtgagtaacgcgtgggtaacctgccatatacagggggataacagttagaaatgactgctaataccccataagcgcacagcgaggcatctcgcagtgtgaaaagccgagacggtatatgatggacccgcgtctgattagctagttgggagggtaacggcctaccaaggcgacgatcagtagccggcctgagagggtgaacggccacattgggactgagacacggcccaaactcctacgggaggcagcagtggggaatattgcacaatgggggaaaccctgatgcagcgacgccgcgtgagtgaagaagcatttcggtgcgtaaagctctatcagcagggaagaaaatgacggtacctgactaagaagccccggc

SEQ ID NO: 8466 - DNA, 490 bp, unidentified
  misc_feature 1..490: note = Ascusbbf_392533, encodes 16S rRNA
  source 1..490: mol_type = genomic DNA
agagtttgatcctggctcagaacgaacgctggcggcgtgcttaatacatgcaagtcgaacgtgattcccgagcaatcgggatgaaagtggcgaacgggtgagtaacacgtaagtaatctgcctctaagattgggataaccctgccaacgcggggctaataccggatgtggtcccgccaacgcatgttggcgggattaaaggagcaatccgcttagagatgaacttgcggcccattagtttgttggtgaggtaacggcccaccaagactgagatgggtagccggcctgagagggtggacggccacattgggactgagatacggcccagactcctacgggaggcagcagtagggaattttgcgcaatggacgaaagtctgacgcagcaacgccgcgtgaaggatgaaggccttcgggttgtaaacttctgttggatgggaaaaaaatcccgcaagggactgatggtaccattcgagtaagcaccggctaact

SEQ ID NO: 8467 - DNA, 490 bp, unidentified
  misc_feature 1..490: note = Ascusbbf_532232, encodes 16S rRNA
  source 1..490: mol_type = genomic DNA
agagtttgatcctggctcaggatgaacgctagctacaggcttaacacatgcaagtcgaggggtagcaggatctagcaatagattgctgacgaccggcgcacgggtgagtaacacgtatccaaccttccgtttactcggggatagcctttcgaaagaaagattaatacccgatagtatgtttcttccgcatgggagaaccattaaagtttttcggtaatcgatggggatgcgttccattaggcagttggtgaggtaacggctcaccaaaccttcgatggataggggttctgagaggaaggtcccccacattggaactgagacacggtccaaactcctacgggaggcagcagtgaggaatattggtcaatggacgagagtctgaaccagccaagtagcgtgaaggatgactgccctatgggttgtaaacttcttttatatgggaataaaggagcctacgtgtaggtttttgtatgtaccatacgaataagga

SEQ ID NO: 8468 - DNA, 490 bp, unidentified
  misc_feature 1..490: note = Ascusbbf_493246, encodes 16S rRNA
  source 1..490: mol_type = genomic DNA
agagtttgatcatggctcagattgaacgctagcgggatgctttacacatgcaagtcgaacggtagcacgaagaaagcttgctttctttggtgacgagtggcgaacgggtgagtaatgtatcggaacgtacccagtagcgggggataactacgcgaaagcgtggctaataccgcatacgccctacgggggaaagggggggatcgcaagacctctcactattggagcggccgatatcggattagctagttggtggggtaaaggcctaccaaggcaacgatccgtagctggtttgagaggacgaccagccacactgggactgagacacggcccagactcctacgggaggcagcagtggggaattttggacaatgggggcaaccctgatccagccatcccgcgtgtgcgatgaaggccttcgggttgtaaagcacttttggcagagaagaaacggcctgggctaataccctgggctaatgacggtatctgcaga

SEQ ID NO: 8469 - DNA, 490 bp, unidentified
  misc_feature 1..490: note = Ascusbbf_232911, encodes 16S rRNA
  source 1..490: mol_type = genomic DNA
agagtttgatcatggctcagattgaacgctggcggcatgctttacacatgcaagtcgaacggcagcacgggagcttgctcctggtggcgagtggcggacgggtgagtaatacatcggaacatgccctgtagagggggataactgaacgaaagttcagctaataccgcatgagacctgagggtgaaagctggggactgagaggcctagcgctacaggattggccgatggctaattagctagttggtggggtaatagcttaccaaggcgacgattagtagctggtctgagaggatgatcagccacactgggactgagacacggcccagactcctacgggaggcagcagtggggaattttggacaatgggcggaagcctgatccagctatgccgcgtgagtgaagaaggccttcgggttgtaaagctctttcggttgggaagaagtttgcgtgtttaagagatatgtgaattgacggtaccgacagaagaagc

SEQ ID NO: 8470 - DNA, 490 bp, unidentified
  misc_feature 1..490: note = Ascusbbf_271110, encodes 16S rRNA
  source 1..490: mol_type = genomic DNA
agagtttgatcctggctcaggatgaacgctggcggcgtgcctaacacatgcaagtcgaacggagcttatggtgaaagatacttcggtagatggaagcgtaagcttagtggcggacgggtgagtaacgcgtggagaacctgccctgtaccgggggataacagagggaagcttctgctaataccgcataagcgcacggcaccgcatggtgcagtgtgaaaaactccggtggtacaggatggctccgcgttggattagcttgttggcggggcaacggcccaccaaggcgacgatccatagccggcctgagagggtgaacggccacattgggactgagacacggcccagactcctacgggaggcagcagtggggaatattgcacaatggggggaaccctgatgcagcgacgccgcgtgaaggaagaagtatctcggtatgtaaacttctatcagcagggaagacaatgacggtacctgcataagaagccccggc

SEQ ID NO: 8471 - DNA, 363 bp, unidentified
  misc_feature 1..363: note = Ascusbbf_1608761, encodes 16S rRNA
  source 1..363: mol_type = genomic DNA
agagtttgatcctggctcagaacgtacgctggcggcgcgtcttaagcatgcaagtcgagcgggaataagggagcttgcttccttatgagagcggcggactggtgagtaacacgtgggtaacgcaccctcctgacggggacagcctgtggaaacacagggtaataccggatgagatggacttctggaagggagttcatgaaaggagctacggctccgcagggggaacggcccgcggcccatcagctggttggcggggaaaaggcccaccaaggcgatgacgggtatccggcctgagagggtgaacggacacattgggactgagatacggcccagactcctacgggagccagcagccgcggtaat

SEQ ID NO: 8472 - DNA, 490 bp, unidentified
  misc_feature 1..490: note = Ascusbbf_1858857, encodes 16S rRNA
  source 1..490: mol_type = genomic DNA
agagtttgatcatggctcaggacgaacgctggcggcatgcctaatacatgcaagtcgagcgaacagatgaagtgcttgcacttctgacgttagcggcgaacgggtgagtaacacgtaaggaatctacctataagcgggggataacattcggaaacgggtgctaataccgcataatatcttcttccgcatggaagaagattgaaagacggctctgctgtcacttatagatgaccttgcggtgcattagttagttggtggggtaacggcctaccaagacgatgatgcatagccgacctgagagggtgatcggccacattgggactgagacacggcccaaactcctacgggaggcagcagtagggaatcttccgcaatgggcgaaagcctgacggagcaatgccgcgtgagtgaagaaggccttcgggtcgtaaaactctgttataagagaagaacaaattgtagagtaactgctacagtcttgacggtatct

SEQ ID NO: 8473 - DNA, 490 bp, unidentified
  misc_feature 1..490: note = Ascusbbf_703905, encodes 16S rRNA
  source 1..490: mol_type = genomic DNA
agagtttgatcctggctcaagacgaacgctggcggcgtgcctaacgcatgcaagtcgagcggagatgctggggtctgagaggggaaactcttgaaggctttagcatcttagcggcggacgggtgagtaacacgtgagcaacctaccctcagcacggggataacagctcgaaagggctgctaatacccgatgggaccacggcatcgcatggtgctgtggtgaaagggtagccggagaggctataccggctggggatgggctcgcggcccatcagctagttggtggggtaacggcctaccaaggcgacgacgggtagccggcctgagagggtgtacggccacagtgggactgagacacggcccacactcctacgggaggcagcagcggggaatcttgcgcaatgggcgaaagcctgacgcagcgacgccgcgtgagggaagaagcccttcggggtgtaaacctctttggacggggagaagaggaagatagta

SEQ ID NO: 8474 - DNA, 490 bp, unidentified
  misc_feature 1..490: note = Ascusbbf_1333661, encodes 16S rRNA
  source 1..490: mol_type = genomic DNA
agagtttgatcatggctcaggacgaacgctggcggcgtgcctaaaacatgcaagtcgaacgaggcccacccagtggcaacactggtgacgacctagtggcgaacgggtgagtaacacgtgaggaacctgccccgaagaccgggataaccctccgaaaggagagctaataccggatgtccccaccagatcgcatggtccggtgaggaaatgcttttgtgcttcgggagggcctcgcggcctatcagctagttggtgaggtcacggctcaccaaggcaacgacgggtagctggtctgagaggacgatcagccacactgggactgagacacggcccagactcctacgggaggcagcagttaggaatcttgcgcaatgggcgaaagcctgacgcagcaacgccgcgtgggggatgaaggccctcgggttgtaaacccctttcagtggggacgaacacagacggtacccacagaagaagcaccggccaactacgt

SEQ ID NO: 8475 - DNA, 468 bp, unidentified
  misc_feature 1..468: note = Ascusbbf_1209759, encodes 16S rRNA
  source 1..468: mol_type = genomic DNA
agagtttgatcatggctcagaacgaacgctggcggcaagcttaacacatgcaagtcgaacgccccgcaaggggagtggcggacgggtgcgtaacacgtgggaatctgcctttaggtaaggaataacttgaggaaacttaagctaataccttataatgtctttggaccaaagatttatcgcctaaagatgagcccgcggtagattagctagttggtggggtaatggcctaccaaggcaacgatctatagctggtcttagaggatgatcagccacactgggactgagacacggcccagactcctacgggaggcagcagtggggaatattgggcaatgggcgaaagcctgacccagctatgccgcgtgaatgatgaaggccttagggttgtaaagttcttttaccagggaagatgatgactgtacctggagaaaaagctccggctaacttcgtgccagcagccgcggtaat

SEQ ID NO: 8476 - DNA, 490 bp, unidentified
  misc_feature 1..490: note = Ascusbbf_1473116, encodes 16S rRNA
  source 1..490: mol_type = genomic DNA
agagtttgatcatggctcaggacgaacgctggcggcgtgcctaacacgtgcaagtcgagcggagccaattaacagatcccttcggggtgacgttgaggaagcttagcggcggacgggtgagtaacgcgtgagtaacctgcctgtaagagggggataacacagagaaatttgtgctaataccgcatattgagtattaatcgcatggttgatacttgaaagatttatcgcttacagatggactcgcgtctgattagctggttggtgaggtaacggctcaccaaggcgacgatcagtagccgaactgagaggttgatcggcaacattgggactgagacacggcccagactcctacgggaggcagcagtgggggatattgcgcaatgggggaaaccctgacgcagcaacgccgcgtgatggaagaaggcctacgggttgtaaacatctgttgcaagggaagaaacaaatgacggtaccttgtgaggaagccacg

SEQ ID NO: 8477 - DNA, 490 bp, unidentified
  misc_feature 1..490: note = Ascusbbf_196220, encodes 16S rRNA
  source 1..490: mol_type = genomic DNA
agagtttgatcatggctcagattgaacgctggcggcatgctttacacatgcaagtcggacggcagcacagagaagcttgcttcttgggtggcgagtggcgaacgggtgagtaacgcatcggaacataccgagtagtgggggataactgtccgaaaggatggctaataccgcatacgctttgagaaggaaagcgggggctcttcggacctcgcgctattcgagcggccgatgtctgattagctggttggtggggtaaaggcctaccaaggcgacgatcagtagcgggtctgagaggatgatccgccacactgggactgagacacggcccagactcctacgggaggcagcagtggggaattttggacaatgggggcaaccctgatccagccatgccgcgtgtctgaagaaggccttcgggttgtaaaggacttttgtcagggaagaaaagctgcgggttaataccccggggtgatgacggtacctgaagaat

SEQ ID NO: 8478 - DNA, 488 bp, unidentified
  misc_feature 1..488: note = Ascusbbf_68359, encodes 16S rRNA
  source 1..488: mol_type = genomic DNA
agagtttgatcatggctcagaacgaacgctggcggcaggcttaacacatgcaagttgaacgggatttcagagtagcttgctattttggatgagagtggcgcacgggtgagtaatacgtgggaacatacctattggtgggggataacgctgggaaactggtgctaataccgcataagccctacgggggaaagattaattgccgatagaatggcccgcggcagattaggcagttggtggggtaaaggcctaccaaaccgacgatctgtagctggtctgagaggacgatcagccacattgggactgagacacggcccagactcctacgggaggcagcagtgaggaatattgggcaatgggggcaaccctgacccagccatgccgcgtgagtgaagaaggttttcggattgtaaagctctttcgggagagaagatgatgacggtatctccagaagaagccccggcaaacttcgtgccagcagccgcggtaat

SEQ ID NO: 8479 - DNA, 490 bp, unidentified
  misc_feature 1..490: note = Ascusbbf_421239, encodes 16S rRNA
  source 1..490: mol_type = genomic DNA
agagtttgatcatggctcaggatgaacgctggcggcgtgcctaacacatgcaagtcgaacgaagcactttcccggaaccttcgggtgaaggggctgtgactgagtggcggacgggtgagtaacgcgtgggtaacctgccctgtacagggggataacagtcagaaatgactgctaataccgcataagcgcactgaggtagcattaccttgtgtgaaaaactccggtggtacaggatgggcccgcgtctgattagcttgttggcggggtaaaggcccaccaaggcgacgatcagtagccggtctgagaggatgaacggccacattggaactgagacacggtccaaactcctacgggaggcagcagtggggaatattgcacaatggggggaaccctgatgcagcaacgccgcgtgggtgaagaagtatttcggtatgtaaagccctatcagcagggaagataatgacggtacctgactaagaagctccggcta

SEQ ID NO: 8480 - DNA, 490 bp, unidentified
  misc_feature 1..490: note = Ascusbbf_295492, encodes 16S rRNA
  source 1..490: mol_type = genomic DNA
agagtttgatcatggctcaggacgaacgctggcggcgtgcctaacacatgcaagtcgaacgagaatctaacgacggagttttcggacaactgagttagaggaaagtggcggactggtgagtaacgcgtgagcaacctgcctttcagagggggacaacagttggaaacgactgctaataccgcataacatatgcttaaggcatctttagcatatcaaaggagcaatccgctgaaagatgggctcgcgtctgattagatagttggcggggcaacggcccaccaagtcgacgatcagtagccggactgagaggttgaacggccacattgggactgagatacggcccagactcctacgggaggcagcagtggggaatattgggcaatggacgcaagtctgacccagcaacgccgcgtgaaggaagaaggctttcgggttgtaaacttcttttaagagggacgaaggacgtgacggtacctcttgaataagccac

SEQ ID NO: 8481 - DNA, 490 bp, unidentified
  misc_feature 1..490: note = Ascusbbf_634490, encodes 16S rRNA
  source 1..490: mol_type = genomic DNA
agagtttgatcatggctcaggatgaacgctggcggcgtgcttaacacatgcaagtcgaacggagctgattgaacggagattcgtcaaagtttaagaaagcttagtggcggacgggtgagtaacgcgtgggtaacctgcctcatagagggggataacagttggaaacgattgctaataccgcataagcccacagtaccgcatggtacagagggaaaagaatttatcgctatgagatggacccgcgtttgattagttagttggcggtgtaacggaccaccaagacgacgatcaatagccggactgagaggttgaacggccacattgggactgagacacggcccaaactcctacgggaggcagcagtggggaatattgcacaatgggggaaaccctgatgcagcgacgccgcgtgagtgaagaagtttttcggaatgtaaagctctatcagcagggaagaagaaagacggtacctgactaagaagccccggct

SEQ ID NO: 8482 - DNA, 490 bp, unidentified
  misc_feature 1..490: note = Ascusbbf_369078, encodes 16S rRNA
  source 1..490: mol_type = genomic DNA
agagtttgatcatggctcaggacgaacgctggcggcgcgcctaacacatgcaagtcgaacggactttatggaaactgaggcttcggcggacgaagaagtaaagttagtggcgaacgggtgagtaacacgtgaggaaccaacctttcagagggggataacacttagaaataggtgctaataccgcataagaccacactgaggcatctcagaggggtcaaaggagcaatccgctgaaagacggcctcgcgtccgattaggtagttggtgaggtaacggcccaccaagcctacgatcggtagccggactgagaggttgatcggccacattgggactgagacacggcccagactcctacgggaggcagcagtggggaatattgggcaatgggggaaaccctgacccagcgacgccgcgtgagggaagaaggttttcggattgtaaacctctgtcttcggggaagataatgacggtacccgaggaggaagccacg

SEQ ID NO: 8483 - DNA, 470 bp, unidentified
  misc_feature 1..470: note = Ascusbbf_199170, encodes 16S rRNA
  source 1..470: mol_type = genomic DNA
agagtttgatcatggctcagaacgaacgctggcggcaggcctaacacatgcaagtcgagcgcggtacttgtaccgagcggcagacgggtgagtaacacgtgggaatctacctatcggtggggaataacttcgggaaactgaagctaataccgcatacgccctgagggggaaagatttatcgccgatagatgagcccgcgtctgattagctagttggtaaggtaaaggcttaccaaggcgacgatcagtagctggtctgagaggatgatcagccacattgggactgagacacggcccaaactcctacgggaggcagcagtggggaatattggacaatgggggcaaccctgatccagccatgccgcgtgagtgatgaaggccctagggttgtaaagctctttcaccggtgaagataatgacggtaaccggagaagaagccccggctaacttcgtgccagcagccgcggtaat

SEQ ID NO: 8484 - DNA, 490 bp, unidentified
  misc_feature 1..490: note = Ascusbbf_362567, encodes 16S rRNA
  source 1..490: mol_type = genomic DNA
agagtttgatcctggctcagattgaacgctagcgggatgctttacacatgcaagtcgaacggcagcgcgaagaaagcttgctttctttggcggcgagtggcggacgggtgagtaatgcatcggaatgtgcccagtagcgggggataactactcgaaagagtggctaataccgcatattctctacggaggaaagagggggatcttcggacctctcactactggagcagccgatgtcagattagctagttggtggggtaaaggcctaccaaggcaatgatctgtagctggtttgagaggacgaccagccacactgggactgagacacggcccagactcctacgggaggcagcagtggggaattttggacaatggggggaaccctgatccagccatcccgcgtgtatgatgaaggccttcgggttgtaaagtacttttgacagggaagaaacgacaccacctaatacgtggtgttaatgacggtacctgtaga

SEQ ID NO: 8485 - DNA, 490 bp, unidentified
  misc_feature 1..490: note = Ascusbbf_1510234, encodes 16S rRNA
  source 1..490: mol_type = genomic DNA
agagtttgatcatggctcagaatgaacgttggcggcgtggattaggcatgcaagtcgtgcgagaagctccttcgggagtggacagcggcgaaagggagagtaacgcgtggttacatgccctcgggaccgggatagtagcgggaaactgctagtaataccggataatatctttggatcaaaggtgtgattccgcctgaggattggactgcgttctattagcttgttggtgtggtaatggctcaccaaggctgcgatggataccgggtgtgagagcatggcccggctcactgggactgagacactgcccagacacctacgggtggctgcagtcgagaatcttcggcaatgggggaaaccctgaccgagcgacgccgcgtgcgggatgaaggccttcgggttgtaaaccgctgtcagttgggaggaaatgccagggggctatccccttggcttgaccgatcttcagaggaaggacgggctaagttcgtgccag

SEQ ID NO: 8486 - DNA, 488 bp, unidentified
  misc_feature 1..488: note = Ascusbbf_324043, encodes 16S rRNA
  source 1..488: mol_type = genomic DNA
agagtttgatcatggctcagaacgaacgctggcggcaggcttaacacatgcaagtcgagcgccccgcaaggggagcggcagacgggtgagtaacgcgtgggaatctacccatctctacggaataactcagggaaacttgtgctaataccgtatacgcccttcgggggaaagatttatcggagatggatgagcccgcgttggattagctagttggtgaggtaaaggctcaccaaggcgacgatccatagctggtctgagaggaaggtcccccacattggaactgagacacggtccaaactcctacgggaggcagcagtgaggaatattggtcaatggacgaaggtctgaaccagccaagtagcgtgcaggatgacggccctatgggttgtaaactgcttttatacagggataaagtcgggaacgtgttcccgtttgcaggtactgtatgaataaggaccggctaattccgtgccagcagccgcggtaat

SEQ ID NO: 8487 - DNA, 490 bp, unidentified
  misc_feature 1..490: note = Ascusbbf_1484556, encodes 16S rRNA
  source 1..490: mol_type = genomic DNA
agagtttgatcctggctcaggacgaacgctggcggcgtgcctaatacatgcaagtcgaacgagtttacttttaatgaaggcggtgcttgcaccaactgatttaaaaataaacgagtggcggacgggtgagtaacacgtgggtaacctaccctaaagtgggggataacatttggaaacagatgctaataccgcataatattaaaaaccacatggtttttaattgaaagacggcgtaagctgtcacttttggatggacccgcggcgtattagctagttggtgaggtaacggctcaccaaggcgatgatacgtagccgacctgagagggtgatcggccacattgggactgagacacggcccaaactcctacgggaggcagcagtagggaatcttccacaatggacgaaagtctgatggagcaacgccgcgtgagtgaagaaggttttcggatcgtaaaactctgttattggagaagaacgtatttggtagtaa

SEQ ID NO: 8488 - DNA, 490 bp, unidentified
  misc_feature 1..490: note = Ascusbbf_593604, encodes 16S rRNA
  source 1..490: mol_type = genomic DNA
agagtttgatcctggctcagattgaacgctggcagcaggcctaatacatgcaagtcgaacggtaacataagaaaagcttgcttttcttgatgacgagtggcggacgggtgagtaacatttgggaaactacctgatagagggggacaacagttggaaacgactgctaataccgcatacagcctaagggtgaaagaagcaattcgctatcagatgtgcccaaacgggattagctagtaggtgaggtaaaggctcaccaaggcgacgatcagtaggggttctgagaggaaggtcccccacattggtactgagacacggaccaaactcctacgggaggcagcagtgaggaatattggtcaatgggcgcaagcctgaaccagccaagtagcgtgcaggatgactgccctatgggttgtaaactgcttttatacggggataaagtcagagtcgtgactctgtttgtaggtaccgtatgaataaggaccggctaatt

SEQ ID NO: 8489 - DNA, 490 bp, unidentified
  misc_feature 1..490: note = Ascusbbf_1762086, encodes 16S rRNA
  source 1..490: mol_type = genomic DNA
attgatcatggctcagaacgaacgctggcggcgtgcttaatacatgcaagtcgaacgtgattttcgtagcaatacgggatgaaagtggcgaacgggtgagtaacacgtaagtaatctgccttcaagtttgggataaccctgccaacgcggggctaataccggatgtggtccattagactcatgtttattggattaaaggtcgcaagaccgcttggagatgagcttgcggcccattagcttgttggtgaggtaacggctcaccaaggctttgatgggtagccggcctgagagggtgtacggccacattgggactgagatacggcccagactcctacgggaggcagcagtagggaattttgcgcaatggacggaagtctgacgcagcaacgccgcgtgaaggatgactgccttcgggttgtaaacttctgttggatgggaaaaaaagcccgggtgaccgggaattgatggtaccattcgagtaagcaccggc

SEQ ID NO: 8490 - DNA, 490 bp, unidentified
  misc_feature 1..490: note = Ascusbbf_1341604, encodes 16S rRNA
  source 1..490: mol_type = genomic DNA
agagtttgatcatggctcaggacgaacgctggcggtgtgcttaacacatgcaagtggtgcgacgaaccaggcttcggcctgaggcaaagccgcgaacgggtgagtaacacgtgggtaatctgccccgatgactgggacaacccgaggaaactcgggctaataccggatgtggtgcctggacataagtctggtcactaaaggtagcttcggcttccgcattgggaggggcccgcggcccattagcttgttggtggggtcaaggcctaccaaggcaacgatgggtagctggtctgagaggacgaccagcaacactgtgacggcgacacggaccagactcctacgggaggcagcagtggggaatcttgcgcaatgcgcgaaagcgtgacgcagcaacaccgcgtgagggaagacggccttagggttgtaaacctctttcagatgggacgaaggttggccggtgaatagccgagataattgacggtaccgtcag

SEQ ID NO: 8491 - DNA, 480 bp, unidentified
  misc_feature 1..480: note = Ascusbbf_353173, encodes 16S rRNA
  source 1..480: mol_type = genomic DNA
agagtttgatcctggctcagaacgaacgctggcggcaggcctaatacatgcaagtcgaacgatagatatccttcgggatattgacagtggcgcacgggtgagtaacgcgtgggaatatgccttttggtacggaataacccagggaaacttggactaataccgtatggtcccttcggggtaaagatttatcgccaaaagattagcccgcgttagattagctagttggtggggtaaaagcctaccaaggcgacgatctatagctggtctgagaggatgatcagccacactgggactgagacacggcccagactcctacgggaggcagcagtagggaatattggacaatgggcgaaagcctgatccagccatgccgcgtgagtgatgaaggccttcgggttgtaaagctctttcgctagtgaagataatgactgtaactagataagaagctccggctaacttcgtgccagcagccgcggtaat

SEQ ID NO: 8492 - DNA, 479 bp, unidentified
  misc_feature 1..479: note = Ascusbbf_401837, encodes 16S rRNA
  source 1..479: mol_type = genomic DNA
agagtttgatcctggctcaggatgaacgctggcggcgtgcctaatacatgcaagtcgagcggtaaggcctcttcggaggtacacgagcggcggacggctgagtaacacgtaggaacgtaccccaaactgagggataactgctcgaaagagtagctaataccgcatgtgctctaaggagtaaagcttcggcggtttgggaacggcctgcgcatgattagcttgttggtgaggtaaaagctcaccaaggcgacgatcattagctggtctgagaggatgatcagccagactgggactgagacacggcccagactcctacgggaggcagcagtagggaattttccacaatgggtgtaagcctgatggagcaacgccgcgtgcaggatgaatgccttcgggttgtaaactgcttttatatgtgacgattatgacggtagcatatgaataaggatcggctaactccgtgccagcagccgggtaat

SEQ ID NO: 8493 - DNA, 490 bp, unidentified
  misc_feature 1..490: note = Ascusbbf_188713, encodes 16S rRNA
  source 1..490: mol_type = genomic DNA
agagtttgatcatggctcaggatgaacgctggcggcgtgcgtaacacatgcaagttgagcgacgacgggactgaagtggagacatggaagtcttgagcggagcagcggacgggtgagtaagacatgagaagctgccctttggtgggggacaacgtttggaaacggacgctaataccccataggccgagaggttaaagccgagaggtgccaagggaggtgctcgtggcctatcagctagttggtgaggtaatggctcaccaaggcttcgacgggtagccggcctgagagggtgaccggccacactgggactgagatacggcccagactcctacgggaggcagcagtggggaatattgggcaatgggagagatcctgacccagcgacgccgcgtggacgaagaaggccttcgggtcgtaaagtccttttatgggggaagaaggaagtgacggtaccccatgaataagccccggctaactacgtgccagcagc

SEQ ID NO: 8494 - DNA, 490 bp, unidentified
  misc_feature 1..490: note = Ascusbbf_370188, encodes 16S rRNA
  source 1..490: mol_type = genomic DNA
agagtttgatcatggctcagattgaacgctagcgggatgctttacacatgcaagtcgaacggcagcgcaagaaaagcttgcttttcttggcggcgagtggcgaacgggtgagtaatgtatcggaacgtgcctagtagcgggggataactacgcgaaagcgtggctaataccgcatacgccctacgggggaaagggggggatcgcaagacctctcactattagagcggccgatatcggattagctagttggtggggtaagagcctaccaaggcatcgatccgtagctggtttgagaggacgaccagccacactgggactgagacacggcccagactcctacgggaggcagcagtggggaattttggacaatgggggaaaccctgatccagccatcccgcgtgtgtgatgaaggccttcgggttgtaaagcacttttggcagggaagaaacagcgtcggataatacctggcgtgaatgacggtacctgcaga

SEQ ID NO: 8495 - DNA, 490 bp, unidentified
  misc_feature 1..490: note = Ascusbbf_328372, encodes 16S rRNA
  source 1..490: mol_type = genomic DNA
agagtttgatcctggctcaggatgaacgctggcggcgtgcttaacacatgcaagtcgaacggagatgcagttaggaagttttcggatggaatgattgcatcttagtggcggacgggtgagtaacacgtaaacaatctgcctccaagagcgggataacagatagaaatatttgctaataccgcataagaccacggccccgcatggggcaggggtaaaaggggagcaatctcgcttggagatgagtttgcggactattagctagttggtgaggtaacggcccaccaaggcagagatggttagccgacctgagagggtgatcggccacactggaactgagacacggtccagactcctacgggaggcagcagtgaggaatattgggcaatggaggaaactctgacccagcaacgccgcgtgaaggaagaaggttttcggattgtaaacttctgttatggaggaaaaaggaagtgatggtactccatgagcaagc

SEQ ID NO: 8496 - DNA, 490 bp, unidentified
  misc_feature 1..490: note = Ascusbbf_520366, encodes 16S rRNA
  source 1..490: mol_type = genomic DNA
agagtttgatcctggctcaggacgaacgctggcggcgtgcctaacacatgcaagtcgagcggagatcagggagtgcttgcacgagctgattttagcggcggacgggtgagtaacgcgtgagcaatctgtcctgcacagggggataacacttggaaacaggtgctaataccgcatgagaccacggtgccacatgacacaggggtcaaaggagaaatccggtgcagggtgagctcgcgtcccattagatagttggcggggtaacggcccaccaagtcgacgatgggtagccgacctgagagggtgatcggccacactgggactgagacacggcccagactcctacgggaggcagcagtggggaatattgggcaatgggcgcaagccttacccagcaacgccgcgtgagggaagaaggttttcggattgtaaacctctgtcctgggggacgaaggaagtgacggtaccccgggaggaagccccggctaactac

SEQ ID NO: 8497 - DNA, 487 bp, unidentified
  misc_feature 1..487: note = Ascusbbf_451185, encodes 16S rRNA
  source 1..487: mol_type = genomic DNA
agagtttgatcatggctcagaacgaacgctggcggcaggcttaacacatgcaagttgaacgggaatctgaggtagcttgctaccgaggaggagagtagcgcactggtgagtaacacgtgggaacgtacattgtagtggggaacaacagagggaaacttctgctaataccgcatacgccctgagggggaaagatttatcgctatgatatcggcccgcggaagattaggtagttggtggggtaaaggcctaccaagcctacgatctatagctggtctgagaggacgatcagccacattggaactgagacacggtccagactcctacgggaggcagcagtgaggaatattgggcaatggaggaaactctgacccagccatgccgcgtgagtgagaaggttttaggattgtaaagctctttcgggcgagaagatgatgacggtatcgccagaagaagccccggcaaacttcgtgccagcagccgcggtaat

SEQ ID NO: 8498 - DNA, 490 bp, unidentified
  misc_feature 1..490: note = Ascusbbf_305498, encodes 16S rRNA
  source 1..490: mol_type = genomic DNA
agagtttgatcctggctcagattgaacgctggcggcaggcttaacacatgcaagtcgaacgaggttagggagcttgctcctgatacctagtggcgaacgggtgagtaatgcttaggaatctgcctagtagtgggggataactatccgaaaggatagctaataccgcatacgacctacgggtgaaagggggcgcaagctctcgctattagatgagcctaagtcggattagctagttggtggggtaaaggcctaccaaggcgacgatctgtagctggtctgagaggatgatcagccacactgggactgagacacggcccagactcctacgggaggcagcagtggggaatattggacaatgggcgaaagcctgatccagccatgccgcgtgtgtgaagaaggccttttggttgtaaagcactttaagtagggaggaaaagctaatggttaatacccattagccctgacgttacctacagaataagcaccggct

SEQ ID NO: 8499 - DNA, 490 bp, unidentified
  misc_feature 1..490: note = Ascusbbf_396039, encodes 16S rRNA
  source 1..490: mol_type = genomic DNA
agagtttgatcctggctcaggactaacgctggcggcgtgctttaaacatgcaagtcgaacggaggttaggtgttgcactaagcatttctatacggagtgtttagtgcaatgcttacccttagtggcggacgggtgagtaacgcgtgagtaatctacctttatctgggggacaacagttggaaacgactgctaataccgcataagaccacaggcacacaagtgctaggggtaaaagatttttcgaataaagatgagctcgcgtagcattagttagttggtgaggtaacggcccaccaagaccgtgatgcttagccgatctgagaggatgatcggccacactggaactgagatacggtccagactcctacgggaggcagcagttaggaatattgggcaatggaggcaactctgacccagcaacgccgcgtgaaggatgaaggtcctcggattgtaaacttctgtattagaggaagaagatagtgacggtact

SEQ ID NO: 8500 - DNA, 470 bp, unidentified
  misc_feature 1..470: note = Ascusbbf_1894312, encodes 16S rRNA
  source 1..470: mol_type = genomic DNA
agagtttgatcatggctcagaacaaacgctggcggcaggcctaacacatgcaagtcgagcggtcccttcgggggcagcggcggacgggtgagtaacgcgtgggaacgtgccccttggtgtggaacaaccgctggaaacggcggctaatgccacatgatgtctacggaccaaagatttatcgccaagggatcggcccgcgttggattaggtagttggtggggtaatggctcaccaagccgacgatccatagctggtttgagaggatgatcagccacactgggactgagacacggcccagactcctacgggaggcagcagtggggaatcttggacaatgggggaaaccctgatccagccatgccgcgtgagcgatgaaggccttagggttgtaaagctctttcacccgtgaagataatgacggtagcgggagaagaagccccggctaactccgtgccagcagccgcggtaat

SEQ ID NO: 8501 - DNA, 490 bp, unidentified
  misc_feature 1..490: note = Ascusbbf_1683994, encodes 16S rRNA
  source 1..490: mol_type = genomic DNA
agagtttgatcatgctcaggacgaacgctggcggcgtgccttagacatgcaagtcgaacgaagcacttatctccgatcatttcggtgtgaagagatctgtgacttagtggcgaacgggtgagtaacacgtgagtgacctgccccgaagtgcggcataacagggggaaacccttgctaattccgcatgtgctcccacctcttgtggtgtgagtaaagatttatcgcttcgggatgggctcgcggtccatcagctagttggtagggtaatggcctaccaaggcgacgacggatagccggcctgagagggtgtacggccacaggggcactgagatacgggccccactcctacgggaggcagcagttaggaatcttccacaatgggcgaaagcctgatggagcgacgccgcgtgagggacgaaggtctttggatcgtaaacctctaaaagtgggacgataatgacggcaccacttgaaaagcaccggctaactc

SEQ ID NO: 8502 - DNA, 490 bp, unidentified
  misc_feature 1..490: note = Ascusbbf_1257171, encodes 16S rRNA
  source 1..490: mol_type = genomic DNA
agagtttgatcatggctcaggatgaacgctagcgacaggcttaacacatgcaagtcgaggggcagcggtgcgcagcaatgcgcagccggcgaccggcgcactggtgagtaacacgtatgcaacctgcccgtgcctgggggataaactggagaaatccggcctaataccccgtaagccgcgcgtccgcatggccgtgcggtgagaggagcgatccgtgcacggatgggcatgcggcgcattagctggttggcggggtgacggcccaccaaggcgacgatgcgtaggggttctgagaggaaggtcccccacactggtactgagacacggaccagactcctacgggaggcagcagtgaggaatattggtcaatggacggaggtctgaaccagccaagtcgcgtgtgggaagacggtcctatggattgtaaaccactttagccggggggcagcacgcgggacgcgtcccgcgccgagagtacccggagaataag

SEQ ID NO: 8503 - DNA, 490 bp, unidentified
  misc_feature 1..490: note = Ascusbbf_606159, encodes 16S rRNA
  source 1..490: mol_type = genomic DNA
agagtttgatcctggctcagagtgaacgctggcggcgtggctaagacatgcaagtcgagcggttatatgctttcgggcatatgatagcggcaaacgggtgagtaacacgtaagcaacctacccttaagactgggatagcctgatgaaagttggggtaataccggatgaggagcattggtgcatgccaatggatctaaaggcatggaaaggcgcttaaggaggggcttgcggcctatcagctagttggtggtgtaacggaccaccgaggcgaagacgggtagccggtctgagaggacgaacggccacattggaactgagacacggtccaaacatctacggatggcagcagtttcgaattattcacaatgggcggaagcctgatggtgcgacgtcgcgtggaggaagaaggtctttggattgtaaactcctgtcattagggagcaaagtgcaagtgaagagcttgttttgagttaacctaaagaggaagcag

SEQ ID NO: 8504 - DNA, 490 bp, unidentified
  misc_feature 1..490: note = Ascusbbf_503636, encodes 16S rRNA
  source 1..490: mol_type = genomic DNA
agagtttgatcctggctcaggatgaacgctggcggcgcgcctaacacatgcaagtcgaacggccggacccaccccggtgggcgaggcagtggcgaacggctgagtaacacgtgggcaacctgcccccctccccgggacagcctcgggaaaccgtgggtaataccggatactccgccccctccgcatgggaggggcgggaaagctccggcggggggggatgggcccgcggcctgttagctagttggcggggcagaggcccaccaaggcgacgatgcgtaggggttctgagaggaaggtcccccacattggtactgagacacggaccaaactcctacgggaggcagcagtgaggaatattggtcaatgggcgggagcctgaaccagccaagtcgcgtgagggaggaaggtcctacggattgtaaacctctttagccggggagcaacgtgcgccacgcgtggcgcagtgagagtacccggagaataagcatcg

SEQ ID NO: 8505 - DNA, 490 bp, unidentified
  misc_feature 1..490: note = Ascusbbf_698927, encodes 16S rRNA
  source 1..490: mol_type = genomic DNA
agagtttgatcctggctcaggatgaacgctagcgataggcttaacacatgcaagtcgaggggcagcatggtcttagcttgctaagactgatggcgaccggcgcacgggtgcgtaacgcgtatgcaacttgccttacagagggggataacccgttgaaagacggactaacaccgcatatgctcaggggtctgcatgggcctttgaggaaatatttatagctgtaagataggcatgcgtcccattagcttgttggtgaggtaacggctcaccaaggcaacgatgggtaggggaactgagaggtttatcccccacactggtactgagacacggaccagactcctacgggaggcagcagtgaggaatattggtcaatgggcgagagcctgaaccagccaagtcgcgtgaaggatgaaggccctatgggtcgtaaacttcttttatacgggaataacgagccttacgggtagggcgctgaatgtaccgtaggaat

SEQ ID NO: 8506 - DNA, 490 bp, unidentified
  misc_feature 1..490: note = Ascusbbf_1643956, encodes 16S rRNA
  source 1..490: mol_type = genomic DNA
agagtttgatcctggctcagattgaacgctggcggcatgcctaacacatgcaagtcgaacggcagcacggtctagcttgctagatgggtggcgagtggcgaacgggtgagtaacgcgtaggaatatgccttgaagagtgggacaacttggggaaactcaagctaataccgcataatgtctgaggacgaaagctggggaccttagggcctggcgcttcaagattagcctgcgtccgattagctagttggtggggtaaaggcctaccaaggcgacgatcggtagctggtctgagaggatgaccagccacactggaactgagacacggtccagactcctacgggaggcagcagtggggaatattggacaatggggggaaccctgatccagcaatgccgcgtgtgtgaagaaggcctgagggttgtaaagcactttcagtggggaggaggatatttaggttaagagctagaatattggacgttacccacagaag

SEQ ID NO: 8507 - DNA, 490 bp, unidentified
  misc_feature 1..490: note = Ascusbbf_1394049, encodes 16S rRNA
  source 1..490: mol_type = genomic DNA
agagtttgatcctggctcaggatgaacgctggcggcaggcttaatacatgcaagttgaacggtaacatgattgtagcaatacgattgatgacgagtggcgtacgggtgcgtaacacgtgtgcaacctaccttatacaggaacaaaacgtcgagaaattggcgctaatattccataatgttattttgtggcatcacaagataattaaagctacggcggtataagatgggcacgcgtcccattagctagttggtaaggtaacggcttaccaaggcgacgatgggtaggggttctgagaggatacacccccacactggaactgagacacggtccagactcctacgggaggcagcagtaaggaatattggtcaatggaggcaactctgaaccagccatgccgcgtgcaggaagacggccttatgggttgtaaactgcttttattagaggataaatataggtacgtgtacttatttgcaggtatctaatgaataa

SEQ ID NO: 8508 - DNA, 490 bp, unidentified
  misc_feature 1..490: note = Ascusbbf_1732749, encodes 16S rRNA
  source 1..490: mol_type = genomic DNA
agagtttgatcatggctcaggatgaacgctggcggagtgcctaatacatgcaagtcgagcggcaacatgcttctcaccaaggttcgaagcgggaataggaaatctaatccctttacttcgagctttcgtgagaagtgatggcgagcggcggacggctgagtaacgcgtgggaacgtgccccaaagtgaggaataactgcccgaaagggtagctaatgccgcatatggtcttcggattaaaggatttatccgctttgggagcggcccgcgtcagattaggttgttggtgaggtaatggctcaccaagccgacgatctgtagctggtctgagaggatgatcagccagactgggactgagacacggcccagactcctacgggaggcagcagtaaggaatcttccacaatggacgaaagtctgatggagcaactccgcgcgcaggatgaaggccttcgggttgtaaactgcttttatttgtgaagaatatgacg

SEQ ID NO: 8509 - DNA, 490 bp, unidentified
  misc_feature 1..490: note = Ascusbbf_1287997, encodes 16S rRNA
  source 1..490: mol_type = genomic DNA
agagtttgatcctggctcaggatgaacgctggcggcgtgcttaacacatgcaagtcgaacgaagaggtgcgaaaggataggcttcggtcttgaattttgcacatatcttagtggcggacgggtgagtaacgcgtgggcaacctgccctttacaggggaataatcattggaaacgatgactaataccgcatgtcaccgtgaaacggcatcgttttacggaaaaaggattttatccggtaaaggatgggcccgcgtctgattagctggttggtggggtaacggcctaccaaggcgacgatcagtagccgacctgagagggtgatcggccacattgggactgagacacggcccaaactcctacgggaggcagcagtggggaatattgcacaatggggggaaccctgatgcagcaacgccgcgtgaaggaagaaggttttcggatcgtaaacttctatcaatagggacgaagaaaatgacggtacctaaataag

SEQ ID NO: 8510 - DNA, 490 bp, unidentified
  misc_feature 1..490: note = Ascusbbf_237917, encodes 16S rRNA
  source 1..490: mol_type = genomic DNA
agagtttgatcatggctcaggacgaacgctggcggcgtgcctaacacatgcaagtcgaacggagctgtttcacgaaggtcttcggattggacgaggcagcttagtggcggacgggtgagtaacgcgtgagcaacctgcctttcagagggggacaacggttggaaacgaccgctaataccgcatgaagcaatcggaccgcatgatctgattgccaaagattttatcgctgaaagatgggctcgcgtctgattagatagttggtggggtaacggcctaccaagtcgacgatcagtagccggactgagaggttgaacggccacattgggactgagatacggcccagactcctacgggaggcagcagtggggaatattgggcaatgggggcaaccctgacccagcaacgccgcgtgaaggaagaaggctttcgggttgtaaacttcttttaccagggacgaagaacgtgacggtacctggagaaaaagccacgg

SEQ ID NO: 8511 - DNA, 480 bp, unidentified
  misc_feature 1..480: note = Ascusbbf_44270, encodes 16S rRNA
  source 1..480: mol_type = genomic DNA
agagtttgatcatggctcagaacgaacgctgtcgacatgcttaacacatgcaagtcggacgggtataacttgttataccagtggcaaacgggtgagtaatacgtagaaatgtacccagtagtttcgaataacaactggaaacggttggtaatacgggataagatagagatatgaaaggtctgaaaggatcgctattggagcagtctacgatggattagatagttggtgaggtaaaggctcaccaagtcgaagatccatagctggtctgagaggatgaacagccacattgggactgagatacggcccagacttctacgggaggcagcagtggggaatattggacaatgggggaaaccctgatccagcgatgtcgagtgaatgaagaaggccttagggttgtaaaattcttttataagcgattaagaagaaagtaacttatgaataagctccggcaaacttcgtgccagcagccgcggtaat

SEQ ID NO: 8512 - DNA, 490 bp, unidentified
  misc_feature 1..490: note = Ascusbbf_203709, encodes 16S rRNA
  source 1..490: mol_type = genomic DNA
agagtttgatcatggctcaggacgaacgctggcggcgtgcctaatacatgcaagtagaacgctgattactagagcttgctctggtatgatgagttgcgaacgggtgagtaacgcgtaggtaacctacctcttagcgggggataactattggaaacgatagctaataccgcataacagttttagtcgcatgactgagatttgaaaggcgcaactgcgtcactaagagatggacctgcgttgtattagctagttggtgaggtaacggctcaccaaggcttcgatacatagccgacctgagagggtgatcggccacactgggactgagacacggcccagactcctacgggaggcagcagtagggaatcttcggcaatggacggaagtctgaccgagcaacgccgcgtgagtgaagaaggttttcggatcgtaaagctctgttgtaagagaagaacgttgtgtagagtggaaaattacacaagtgacggtatct

SEQ ID NO: 8513 - DNA, 490 bp, unidentified
  misc_feature 1..490: note = Ascusbbf_825562, encodes 16S rRNA
  source 1..490: mol_type = genomic DNA
agagtttgatcatggctcaggacgaacgctggcggtgtgcctcatacatgcaagtcgaacgataaggcttcttcggaagtacataagtggcggacgggtgagtacaacataggaaatctgccttagggtgggggacaacagagggaaactcctgctaataccccatatgagctaacttgaaatagttatcttgaaaactccggtgccctaagatgagcctgtgcctgattagctggttggtggtgtaatggactaccaaggcgacgatcagtagctggtttgagaggatgatcagccacaatgggactgagacacggcccatactcctacgggaggcagcagtagggaattttgcgcaatgggggaaaccctgacgcagcaacaccgcgtgaatgttaagcccttcggggtgtaaagttctgtcagtagggaagaacaaatgcctttccctacaaaggaagcaccggctaactccgtgccagcagccgcg

SEQ ID NO: 8514 - DNA, 490 bp, unidentified
  misc_feature 1..490: note = Ascusbbf_148091, encodes 16S rRNA
  source 1..490: mol_type = genomic DNA
agagtttgatcatggctcaggattaacgctggcggtacgtctaatacatgcaagtcgaacggacacttcggtgtcagtggcgaacgggtgagtaacacgtaggtaacctgcccttaagacggggataacttttggaaacgaaagctaataccggattgaaagtagaataggcatctattttatttaaaaggtcctttcggggactgcttaaggaggggcctgcggcgcattagttagttggtgaggtaatggctcaccaagacgatgatgcgtagctggactgagaggttgaacagccacactgggactgagaacggcccagactcctacgggaggcagcagtagagaatcttcggcaatggggggaaccctgaccgagcgataccgcgtgaatgaagaaatacttcggtatgtaaagttcttttatataggatgaatggtatgggtaggaaatgaccaataaatgacagtactatttgaataagccccg

SEQ ID NO: 8515 - DNA, 490 bp, unidentified
  misc_feature 1..490: note = Ascusbbf_647979, encodes 16S rRNA
  source 1..490: mol_type = genomic DNA
agagtttgatcctggctcaggacgaacgctggcggcgggtttaatacatgcaagtcgagggacgaagtttggtgcttgcaccgaacggaaaccggcgaacgggtgagtaacacgtgagaaacctacccttcactttgggataacccaaggaaacttgggctaatactggatatcccggttggatcgcatgatccttccgggaaagctccggcggtgatggacggtctcgcggcctatcagcttgttggtgaggtaacggctcaccaaggcgacgacgggtagctggagtgagagctcgagcagccacactgggactgagacacggcccagactcctacgggaggcagcagtagaggatcttgcacaatgggcgaaagcctgatgcagccacgccgcgtgagggacgaatgtcttcggattgtaaacctctttcagtcgtgaagaagcgcaagtgacggtagcgacagaagaagccccggctaactacgtg

SEQ ID NO: 8516 - DNA, 490 bp, unidentified
  misc_feature 1..490: note = Ascusbbf_136593, encodes 16S rRNA
  source 1..490: mol_type = genomic DNA
agagtttgatcctggctcaggatgaacgctggcggtatgcctaatacatgcaagtcgagcgggggacttcggtccctagcggcgaacgggtgagtaacacgttggtaatctacctttcagttggggatacccaggcgaaagcttggctaataccgtaatacgtattaagttgagatacttaatataaaaggcccttcggggtcgctgatagatgagcctgcgtctgattagctagttggtgagataatagcccaccaaggcgaggatcagtagccgacctgagagggtgatcggccacaatggaactgagacacggtccatactcctacgggaggcagcagtagggagtcttcgacaatgggggaaaccctgatcgagcaataccgcgtgagtgatgaaggtcttcggattgtaaagctcttttaattgggagaaataactagggtaggtaatgaccttagtttgatagtaccttttgaataagcaacga

SEQ ID NO: 8517 - DNA, 490 bp, unidentified
  misc_feature 1..490: note = Ascusbbf_175961, encodes 16S rRNA
  source 1..490: mol_type = genomic DNA
agagtttgatcctggctcaggacgaacgctggcggcgtgcctaacacatgcaagtcgagcgagaagctcataaacgagccttcgggcaagtgagtgagtggaaagcggcggacgggtgagtaacgcgtgagtaatctgccttaaggagggggataacgcagagaaatctgcgctaataccgcataacacataactgttgcatgacagatatgtcaaaattccggtgccttaagatgagctcgcgtccgattagttagttggcggggtaaaggcccaccaagacgacgatcggtagccggactgagaggttgaacggccacattgggactgagacacggcccagactcctacgggaggcagcagtgggggatattgcgcaatggggggaaccctgacgcagcaacgccgcgtgaaggaagaaggtcttcggattgtaaacttttgtcttttgggacgaagaagtgacggtaccaaaggaggaagccacggc

SEQ ID NO: 8518 - DNA, 490 bp, unidentified
  misc_feature 1..490: note = Ascusbbf_580406, encodes 16S rRNA
  source 1..490: mol_type = genomic DNA
agagtttgatcatggctcaggatgaacgctagctacagacttaacacatgcaagtcgaggggcagcatgatcttagcttgctaagattgatggcgaccggcgcacgggtgcgtaacgcgtatccaacctgccgtgtacacggggacagccctctgaaaggaggattaatacccgatgtggtccttggggggcatctcccggggactaaagatttatcggtacaccgatggggatgcgtacgattagcttgccggcggggtaacggcccaccggggcaacgatcgttaggggttctgagaggaaggtcccccacataggaactgagacacggtcctaactcctacgggaggcagcagtgaggaatattggtcaatgggcgcgagcctgaaccagccaagtagcgtgaaggatgactgccctacgggttgtaaacttcttttacgggagaataaagtgaggcacgcgtgccttattgcaggtatcccgtgaa

SEQ ID NO: 8519 - DNA, 490 bp, unidentified
  misc_feature 1..490: note = Ascusbbf_1726684, encodes 16S rRNA
  source 1..490: mol_type = genomic DNA
agagtttgatcatggctcaggacgaacgctggcggcgtgcctaatacatgcaagtcgagcgagctgaattcaaagattccttcgggatgatttgttggacgctagcggcggatgggtgagtaacacgtgggcaatctgccctaaagactgggataccacttggaaacaggtgctaataccggataacaacatgaatcgcatgattcaagtttgaaaggcggcgtaagctgtcactttaggatgagcccgcggcgcattagctagttggtggggtaaaggcctaccaaggcaatgatgcgtagccgagttgagagactgatcggccacattgggactgagacacggcccaaactcctacgggaggcagcagtagggaatcttccacaatggacgcaagtctgatggagcaacgccgcgtgagtgaagaaggttttcggatcgtaaagctctgttgttggtgaagaaggatagaggcagtaactggtcttta

SEQ ID NO: 8520 - DNA, 490 bp, unidentified
  misc_feature 1..490: note = Ascusbbf_1500451, encodes 16S rRNA
  source 1..490: mol_type = genomic DNA
agagtttgatcctggctcagattgaacgctggcggcaggcctaacacatgcaagtcgaacggcagcggggggtagcttgctaccctgccggcgagtggcggacgggtgagtaatgcctggggagctgcccaatcgagggggataccagttggaaacgactgctaataccgcatacgccctgagggggaaaggtggggatcttcggacctaccgcgattggatgcacccaggtgggattagctagttggtgaggtaacggctcaccaaggcgacgatctctagctggtctgagaggatgaccagccacactggaactgagacacggtccagactcctacgggaggcagcagtggggaatattgcacaatgggggaaaccctgatgcagccatgccgcgtgtgtgaagaaggccttagggttgtaaagcactttcagcgaggaggaaaggtggctagctaatacctggttgctgtgacgttactcgcagaag

SEQ ID NO: 8521 - DNA, 490 bp, unidentified
  misc_feature 1..490: note = Ascusbbf_656872, encodes 16S rRNA
  source 1..490: mol_type = genomic DNA
agagtttgatcctggctcaggacgaacgctggcggcgtgcttcaaacatgcaagtcgaacgaggtaagaaggagcttgctcctgacgacctagtggcggacgggtgagtaacgcgtgagcaatctggctattacagggggataacacttagaaatgagtgctaataccgcgtatgaccacaacctggcatcaggaaggggtgaaaggagaaatccggtaatagatgagcttgcgtttcattagctagttggtgacggtaacggcgcaccaaggcgacgatgaatagccgatctgagaggatgaccggccacactggaattgagaaacggtccagactcctacgggaggcagcagttaggaatattgggcaatggagggaactctgacccagcaacgccgcgtgaaggaagaaggttttcggattgtaaacttctgatctatgggaagaagaaagtgacggtaccataggagaaagccacggctaactacg

SEQ ID NO: 8522 - DNA, 490 bp, unidentified
  misc_feature 1..490: note = Ascusbbf_1058542, encodes 16S rRNA
  source 1..490: mol_type = genomic DNA
agagtttgatcatggctcaggatgaacgctggcggcgtgcctaacacatgcaagtcgaacgaagaccccgaggcagagatttcggtcgaagccaagggaggactgagtggcggacgggtgagtaacgcgtggataacctgccccatacagggggatagcagttggaaacgactgataataccgcataagcgcacggggagacatctctttgtgtgaaaagatttatcggtatgggatgggtccgcgtccgattagcaagatggcggggtaaaggcccaccaaagcgacgatcggtagccggcctgagagggcggacggccacattgggactgagacacggcccagactcctacgggaggcagcagtgggggatattgcacaatggggggaaccctgatgcagcgacgccgcgtgggtgaagaagtatttcggtatgtaaagccctatcagcagggaagaaagtgacggtacctgagtaagaagccccggc

SEQ ID NO: 8523 - DNA, 490 bp, unidentified
  misc_feature 1..490: note = Ascusbbf_163863, encodes 16S rRNA
  source 1..490: mol_type = genomic DNA
agagtttgatcatggctcagaatgaacgttggcggcgtggattaggcatgcaagtcgcgcgatttccttcggggaagagcggcggaagggagagtaacgcgtagatacctaccctcgggaccggaatagcgacgggaaactgtcggtaatgccggataacgtccctggaccaaaggtgtgaatccgcctgaggaggggtctgcgtcctattagctagtcggcggggtaacggcccaccgaggcgaagatgggtaccgggcgtgagagcgtgacccggctcactgggactgagacactgcccagacacctacgggtggctgcagtcgagaatcttcggcaatgagcgcaagcttgaccgagcgacgccgcgtgcgggatgaaggctttcgggttgtaaaccgctgtcagtggggaggaaattcttgggggtactcccccttgattgaccgatccgcagaggaaggacgggctaagttcgtgccagcagccg

SEQ ID NO: 8524 - DNA, 490 bp, unidentified
  misc_feature 1..490: note = Ascusbbf_1896303, encodes 16S rRNA
  source 1..490: mol_type = genomic DNA
agagtttgatcctggctcaggatgaacgctggcggcatgcctaacacatgcaagtcgaacggagttaaaagagcttgcttttttaacttagtggcggacgggtgagtaacgcgtgagcaatctgcctttcagtggggaataatgttctgaaaagagcactaataccgcataatgtataatcgccgcatgacggatataccaaagatttatcgctgagagatgagctcgcgtccgattagccggttggtggtgtaacggcctaccaaagctacgatcggtagccggactgagaggttgaacggccacattgggactgagacacgtcccagactcctacgggaggcagcagtgggggatattgcgcaatgggggaaaccctgacgcagcaatgccgcgtgaaggatgaaggtcttcggattgtaaacttcttttgtcagggacgaaaatgacggtacctgacgaataagctccggctaactacgtgccagca

SEQ ID NO: 8525 - DNA, 490 bp, unidentified
  misc_feature 1..490: note = Ascusbbf_692367, encodes 16S rRNA
  source 1..490: mol_type = genomic DNA
agagtttgatcctggctcagaatgaacgctggcggtgtgcctaacacatgcaagtcgagcgagaaagcttcttcggaagtgagtacagcggcggacgggtgagtaacacgtaagaacctgccttttagtgaagaataccttcgagaaatcgaagttaatgctgcatacgtccctttggggagaaaagtggcttttatgctactgctgaaagatgggcttgcggactatcagcttgttggtggggtaaaggcctaccaaggctatgacggttagccgacctgagagggtgatcggccacattgggactgagacacggcccagactcctacgggaggcagcagtggggaatattgcgcaatgggcgaaagcctgacgcagcaacaccgcgtggaggatgaaggttttaggattgtaaactcctgttagttgggaagaaaagctcttttttaatacagaagagtcatgacggtaccagcagagaaagcaccgg

SEQ ID NO: 8526 - DNA, 490 bp, unidentified
  misc_feature 1..490: note = Ascusbbf_693280, encodes 16S rRNA
  source 1..490: mol_type = genomic DNA
agagtttgatcctggctcaggacgaacgctggcggcgtgcttaacacatgcaagtcgaacgaagagcgatggaagcttgcttctatcaatcttagtggcgaacgggtgagtaacgcgtaatcaacctgcccttcagagggggacaacagttggaaacgactgctaataccgcatacgatctaacctcggcatcgaggaaagatgaaaggtggcctctatttataagctatcactgaaggaggggattgcgtctgattagctagttggaggggtaacggcccaccaaggcgatgatcagtagccggtctgagaggatgaacggccacattgggactgagacacggcccagactcctacgggaggcagcagtggggaatcttccgcaatggacgaaagtctgacggagcaacgccgcgtgagtgatgacggccttcgggttgtaaagctctgttaatcgggacgaaaggccttcttgcgaacagttagaagg

SEQ ID NO: 8527 - DNA, 469 bp, unidentified
  misc_feature 1..469: note = Ascusbbf_236864, encodes 16S rRNA
  source 1..469: mol_type = genomic DNA
agagtttgatcatggctcagaacgaacgctggcggcaggcctaacacatgcaagtcgaacgagatcttcggatctagtggcgcacgggtgagtaacgcgtaggaatctacctattagttcgggataacagttggaaacgactgctaataccggatacgccctttgggggaaagaatttcgctaatagatgagccttcgtgacattaggtagttggtggggtaatggctcaccaagcctacgatgtctagctggtctgagaggatgatcagccacactgggactgagacacggcccagactcctacgggaggcagcagtggggaatattgggcaatgggcgcaagcctgacccagccatgccgcgtgagtgatgacggccttagggttgtaaagctctttcagtagcgaagatgatgacagtagctacagaagaagccccggctaacttcgtgccagcagccgcggtaat

SEQ ID NO: 8528 - DNA, 490 bp, unidentified
  misc_feature 1..490: note = Ascusbbf_545476, encodes 16S rRNA
  source 1..490: mol_type = genomic DNA
agagtttgatcctggctcaggatgaacgctggcggcatgcctaagacatgcaagtcgaacgaggtggcccaaagaagatggagtgcttgcacaaagttggatttggaattaccacctagtggcagacgggtgagtaacacgtgggtaacctgcctctttgttggggataacagttggaaacgactgctaataccgaataagatactcgtatcgaaaggagcccttaaagcttcgcgaagagatgggcctgcggcgtattaactagttggtgaggtaatggctcaccaaggtaacgatgcgtagccggactgagaggtcgaacggccacactgggactgagacacggcccagactcctacgggagacagcagttaggaatattcgtcaatggaggaaactctgaacgagcaatgccgcgtgagtgatgaaggtctttggattgtaaaactctgttgtatggaaagaacagctaagttaggaaatgaactta

SEQ ID NO: 8529 - DNA, 490 bp, unidentified
  misc_feature 1..490: note = Ascusbbf_962534, encodes 16S rRNA
  source 1..490: mol_type = genomic DNA
agagtttgatcatggctcagattgaacgctggcggcaggcctaatacatgcaagtcgaacggtaacataagaaaagcttgcttttcttgatgacgagtggcggacgggtgagtaacatttgggaaactacctgatagagggggacaacagttggaaacgactgctaataccgcatacagcctaagggtgaaagaagcaattcgctatcagatgtgcccaaacgggattagctagtaggtgaggtaaaggctcacctaggcgatgatctctagctggtctgagaggaaggccccccacactgggactgagacacggcccagactcctacgggaggcagcagtgaggaatattggtcaatggcggcaacgctgaaccagccaagtagcgtgagggatgacggccctacgggtcttaaacctcttttgttggggagcaaactgcgccactggtggcgtattgcgagtacccttcgaataagcatcggctaact

SEQ ID NO: 8530 - DNA, 490 bp, unidentified
  misc_feature 1..490: note = Ascusbbf_450141, encodes 16S rRNA
  source 1..490: mol_type = genomic DNA
agagtttgatcatggctcaggatgaacgctagcgggaggcctaacacatgcaagccgagcggtagattgtcttcggataattgagagcggcgtacgggtgcggaacacgtgtgtaacctgcccttatcaaggggatagcccagagaaatttggattaataccctataatacaagatgtggcatcataacttgttaaaaaccacggtggataaggatgggcacgcgcaagattagctagttggtgaggtaacggctcaccaaggcgacgatctttagggggcctgagagggtgatcccccacactgggactgagacacggcccagactcctacgggaggcagcagtgaggaatattggacaatgggtggaagcctgatccagccatcccgcgtgaaggaagacggttctatggattgtaaacttcttttctatggggataaacctactctcgtgagggtagctgaaggtaccataggaataagcaccggct

SEQ ID NO: 8531 - DNA, 490 bp, unidentified
  misc_feature 1..490: note = Ascusbbf_768576, encodes 16S rRNA
  source 1..490: mol_type = genomic DNA
agagtttgatcctggctcaggatgaacgctagcgggaggcttaacacatgcaagccgagggagaagttgtcttcggacagcggacaccggcggacgggtgagtaacatgtatgcaacttgcccctatcagtgagataacccggggaaactcggactaatatcacataacaaacgaaatagcattattttgttttaaaagatttatcggatagggataggcatgcgtaggattagttagttggtgaggtaacggctcaccaagacgatgatccttagggggcctgagagggtgatcccccacactggtactgagacacggaccagactcctacgggaggcagcagtgaggaatattggacaatgggtgagagcctgatccagccatcccgcgtgcaggaagacggccctatgggttgtaaactgcttttatacaggaataaacctactcacgtgtgagtagttgaaggtactgtaggaataagcatcggct

SEQ ID NO: 8532 - DNA, 487 bp, unidentified
  misc_feature 1..487: note = Ascusbbf_1594792, encodes 16S rRNA
  source 1..487: mol_type = genomic DNA
agagtttgatcctggctcaggatgaacgctggcggagtgcctaacacatgcaagtcgagcggcagcgcgagtagtttactacttggcggcgagcggcggacggctgagtaacgcgtgggaacatgccccaaagtgaggaataactgcccgaaagggtggctaatgccgcatatggtcttcggattaaaggatttatccgctttgggagtggcctgcgtacgattagatagttggtgaggtaaaggctcaccaagtctacgatcgttaactggtttgagaggatgatcagtcagactggaactgagacacggtccagactcctacgggaggcagcagtgaggaatcttcacaatggacgaaagtctgatggagcaactccgcgtgcaggatgaaggccttcgggtcgtaaactgcttttatttgtgaagaatatgacggtaacaaatgaataagggtcggctaaatacgtgccaacagccgcggtaat

SEQ ID NO: 8533 - DNA, 210 bp, unidentified
  misc_feature 1..210: note = Ascusbbf_562, encodes 16S rRNA
  source 1..210: mol_type = genomic DNA
agagtttgatcctggctcagattgaacgctggcggcaggcttattgcacaatgggggaaaccctgatgcagccatgccgcgtgtgtgaagaaggccttcgggttgtaaagcacttttgcattcgaggaagacagcacgtaaataaacgtgttatttgacgttagagtgtgaataagcaccggcaaactccgtgccagcagccgcggtaat

SEQ ID NO: 8534 - DNA, 470 bp, unidentified
  misc_feature 1..470: note = Ascusbbf_106927, encodes 16S rRNA
  source 1..470: mol_type = genomic DNA
agagtttgatcatggctcagaacgaacgctggcggcaggcttaacacatgcaagtcgaacgatctcttcggaggtagtggcagacgggtgagtaacacgtgggaacatacctttcagttcggaataactcatggaaacgtgagctaataccggatacgccccctgggggaaagatttatcgctgaaagattggcccgcgtctgattagcttgttggtgaggtaatggctcaccaaggcgacgatcagtagctggtctgagaggatgaccagccacactgggactgagacacggcccagactcctacgggaggcagcagtggggaatattggacaatgggcgcaagcctgatccagccatgccgcgtgagtgatgacggccttagggttgtaaagctctttcgacggggacgataatgacggtacccgtagaagaagccccggctaacttcgtgccagcagccgcggtaat

SEQ ID NO: 8535 - DNA, 490 bp, unidentified
  misc_feature 1..490: note = Ascusbbf_189273, encodes 16S rRNA
  source 1..490: mol_type = genomic DNA
agagtttgatcctggctcagattgaacgctggcggcaggcctaacacatgcaagtcgagcggggttttcggacctagcggcggacgggtgagtaatgtatagggagctgcccgatagagggggataccagttggaaacggctgttaataccgcataatgtctacggaccaaagtgtgggaccttcgggccacatgctatcggatgcacctatatgggattagctggttggtggggtaatggctcaccaaggcgacgatccctagctggtttgagaggatgatcagccacactggaactgagacacggtccagactcctacgggaggcagcagtggggaatattggacaatgggcgcaagcctgatccagccatgccgcgtgtgtgaagaaggccttcgggttgtaaagcactttcagcggggaggaaggggttgttgttaatagcaacaatctttgacgttacccgcagaagaagcaccggctaactccg

SEQ ID NO: 8536 - DNA, 295 bp, unidentified
  misc_feature 1..295: note = Ascusbbf_75288, encodes 16S rRNA
  source 1..295: mol_type = genomic DNA
agagtttgatcatggctcaggcagttggagaatggctattaaatgcgccaaaagctcatgtcactgcttgggtgatttcaatcgcggtgttgcttggggtatggagggcgactaaaaccggcaaatgggaaattgtcctcttgtggatagctgggggcgtgttgttcgtgctcggagcgtcaagtgacgaggaacttgactggtggcgtgaggcattgaccggtggtttttacaccgatcccaacagagttgcagctgtggcggcgatttcctctgtgccagcagccgcggtaat

SEQ ID NO: 8537 - DNA, 490 bp, unidentified
  misc_feature 1..490: note = Ascusbbf_483118, encodes 16S rRNA
  source 1..490: mol_type = genomic DNA
agagtttgatcctggctcaggatgaacgctggcggcatgcctaagacatgcaagtcgaacgagatggtccatcgaaagctgcgtgcttgcacaaagctggacttgggttgccatctagtggcagacgggtgagtaacacgtgggtgacctgccttttcgttggggataacagttggaaacgattgctaataccgaataagatataagagtcaatcttatattgaaaggagcctttaaagctccgcgattagatgggcctgcggcgtattaactagttggtggggtaatggcctaccaaggtaacgatgcgtagccgaactgagaggttgatcggccacactgggactgagacacggcccagactcctacgggagacagcagttaggaatattcgtcaatgggggaaaccctgaacgagcaatgccgcgtgagtgatgaaggtcctttggattgtaaaactctgttgtatggaaaaaacgaccaggttagg

SEQ ID NO: 8538 - DNA, 490 bp, unidentified
  misc_feature 1..490: note = Ascusbbf_797307, encodes 16S rRNA
  source 1..490: mol_type = genomic DNA
agagtttgatcatggctcagaatgaacgctggcggcatggattaggcatgcaagtcgaacgagaaagcggcttcggccgcgagtaaagtggcgaaagggtgagtaacacgtgaggaacctgccctccagtccggaacaaacctgtgaaaacgggcctgaaaccggatgccggccctccccgcatggggcggagccgaaacatttatggctggaggatggcctcgcggcccattagctagttggcggggtatcggcccaccaaggctacgacgggtaggtggtctgagaggatggtcacccacactgggactgagacactgcccagactcctacgggaggctgcagtcgagaatcttccgcaaggggcgcaagcctgacggagcgatgccgcgtgagggacggaggccttcgggtcgtaaacctctgtcgacggggacgaacgcaatgacggtacccgtcaaggaagccacggctaaccacgtgccagcag

SEQ ID NO: 8539 - DNA, 490 bp, unidentified
  misc_feature 1..490: note = Ascusbbf_222837, encodes 16S rRNA
  source 1..490: mol_type = genomic DNA
agagtttgatcatggctcagattgaacgctggcggcaggcttaacacatgcaagtcgagcggggatagggtgcttgcacctgattcctagcggcggacgggtgagtaatacttaggaatctgcctattagtgggggataacggctcgaaagggtcgctaataccgcatacgtcctacgggagaaagcaggggatcgtaagaccttgcgctaatagatgagcctaagtcggattagctagttggtggggtaaaggcctaccaaggcgacgatctgtagcgggtctgagaggatgatccgccacactgggactgagacacggcccagactcctacgggaggcagcagtggggaatattggacaatggggggaaccctgatccagccatgccgcgtgtgtgaagaaggccttatggttgtaaagcactttaagcgaggaggaggctcccgtagctaatatctacggagagtggacgttactcgcagaataagc

SEQ ID NO: 8540 - DNA, 490 bp, unidentified
  misc_feature 1..490: note = Ascusbbf_355930, encodes 16S rRNA
  source 1..490: mol_type = genomic DNA
agagtttgatcatggctcaggacgaacgctggcggcatgcctaacacatgcaagtcgaacggagtctttccggaagtttacttttgggaagacttagtggcggacgggtgagtaacacgtgggtaatctgcctgagagactgggacaacagggggaaaccgctgctaataccagataagctcacggggacgggagttcctgggagaaaaggagaaatccgctttcagatgagcccgcggctgattagccagttggtggggtaacggcctaccaaagcgacgatcagtagccggcctgagagggtgtacggccacactggaactgagacacggtccagactcctacgggaggcagcagtggggaattttccgcaatgggcgaaagcctgacggagcaatgccgcgtgagtgaggaaggccttcgggttgtaaagctctgtcttcggggacgaataaatgacggtacccgaggaggaagccacggctaacta

SEQ ID NO: 8541 - DNA, 490 bp, unidentified
  misc_feature 1..490: note = Ascusbbf_276800, encodes 16S rRNA
  source 1..490: mol_type = genomic DNA
agagtttgatcatggctcaggatgaacgctggcggcgtgcctaatacatgcaagtcgaacggagagctcctatcggacgagtgcttgcactctgaagtgtggaatactcttagtggcgaacgggtgagtaatacatgaacaacctgcccctttgtctgggataacattctgaaaagattgctaataccggataggtactgttgaggcatctcaacttcattaaagatgggtttccatcgcattgggatgggttcatgtcgcattagctagttggtgaggtaacggcccaccaaggctgtgatgcgtagccggtctgagaggacgaacggccacattgggactgagacacggcccagactcctacgggaggcagcagtagggaattttcggcaatgggggcaaccctgaccgagcaacgccgcgtgaacgatgaaggtctttggattgtaaagttctgttacgagggaagaatacttggtataggaaatga

SEQ ID NO: 8542 - DNA, 490 bp, unidentified
  misc_feature 1..490: note = Ascusbbf_1140067, encodes 16S rRNA
  source 1..490: mol_type = genomic DNA
agagtttgatcctggctcagattgaacgctggcggcaggcctaacacatgcaagtcgagcggcagcacgggtgcttgcacctggtggcgagcggcggacgggtgagtaatgcgtgggaacgtgcccattagtgggggataacctggggaaactcaggctaataccgcataagccctacgggggaaagcgggggatcttcggacctcgcgctattggatcggcccacgtcagattagcttgttggtgaggtaaaggctcaccaaggcgacgatctgtaactggtctgagaggatgatcagtcacaccggaactgagacacggtccggactcctacgggaggcagcagtggggaatcttggacaatgggcgcaagcctgatccagccatgccgcgtgtgtgaagaaggccctagggttgtaaagcactttcagcagggaggaaggcttcgggataataccctggagtacttgacgttacctgcagaagaagc

SEQ ID NO: 8543 - DNA, 490 bp, unidentified
  misc_feature 1..490: note = Ascusbbf_1808533, encodes 16S rRNA
  source 1..490: mol_type = genomic DNA
agagtttgatcatggctcagattgaacgctggcggcgtgcctaacacatgcaagtcgagcggtagcaggtgtagcaatacatgctgacgagcggcggacgggtgagtaacgcttgggaatctgcctattagtgggggataactcggggaaactcgagctaataccgcatacgatctacggatgaaagctggggaccgcaaggcctggcgctaatagatgagcccaagtcggattagctagttggtaaggtaatggcttaccaaggcgacgatccgtaactggtctgagaggacgaccagtcacaccggaactgagacacggtccggactcctacgggaggcagcagtggggaatattggacaatgggcgaaagcctgatccagcgacgccgcgtgggtgaagaaggcctgcgggttgtaaagccctttcggtagggaagaaaagtttcgacctaacacgtcgggaccttgacgtaacctactaaagaagc

SEQ ID NO: 8544 - DNA, 472 bp, unidentified
  misc_feature 1..472: note = Ascusbbf_183158, encodes 16S rRNA
  source 1..472: mol_type = genomic DNA
agagtttgatcatggctcagaacgaacgctggcggcaggctttagtcatgcaagttgaacggttatagcaatataacagtagcgcacgggtgagtaatgcatgggaacataccttttggtgggggatattcttcggaaacgaagagcaataccgcataagccctgagggggaaagatttattgccgaaagattggcccatgttagattagctagttggttaggtaaaagctgaccaaggctatgatctatagctggtttgagaggacgaccagccacattgggactgagacacggcccagactcctacgggaggcagcagtcaggaatattggacaatgggggaaaccctgatccagccatgccgcgtgagtgaagaaggcccttgggttgtaaagctcttttgtacgggaagatgatgacggtaccgtaagaataagcaccggctaacttcgtgccagcagccgcggtaat

SEQ ID NO: 8545 - DNA, 490 bp, unidentified
  misc_feature 1..490: note = Ascusbbf_1870272, encodes 16S rRNA
  source 1..490: mol_type = genomic DNA
agagtttgatcatggctcagaatgaacgctggcggcatggattaggcatgcaagtcgaacgagaaaagcggcttcggccgcgagtaaagtggcgaaagggtgagtagcacgtggggaacctgccccggggaccggaacaagcctgtgaaaacgggtctgagaccggatgccgcccccctccgcatggggggagggcgaaagattcatcgccccgggatggccccgcgccccattagctagttggcggggtgacggcccaccaaggctgcgacgggtaggtggtctgagaggatggtcacccacactgggactgagacactgcccagactcctacgggaggctgcagtcgagaatcttccgcaatgggcgcaagcctgacggagcgatgccgcgtgagggaagaaggccctcgggtcgtaaacctctgtcggacgggacgaagccaacgacggtaccgtccaaggaagccacggctaaccacgtgccagca

SEQ ID NO: 8546 - DNA, 490 bp, unidentified
  misc_feature 1..490: note = Ascusbbf_1840140, encodes 16S rRNA
  source 1..490: mol_type = genomic DNA
agagtttgatcctggctcaggacgaacgctggcggcgtgcttaaaacatgcaagtcgaacgggaagttgagaagcttgcttttcaacttctagtggcggacgggtgagtaacgcgtgagtaacctgcctactacagggggataacacagagaaatttgtgctaataccgcataagaccacaacgtggcatcacgaaggggtcaaaggagttaaatccggtagtagaggggcttgcgtctcattagctagttggtggggtaacggcctaccaaggcgacgatgagtagccgatctgagaggatgaacggccacactggaactgagaaacggtccagactcctacgggaggcagcagttaggaatattgggcaatggaggcaactctgacccagcaacgccgcgtgaaggaagaaggttttcggattgtaaacttctgatctgtgggaaaaagagaacgatggtaccacaggagaaagccacggctaactac

SEQ ID NO: 8547 - DNA, 490 bp, unidentified
  misc_feature 1..490: note = Ascusbbf_1882069, encodes 16S rRNA
  source 1..490: mol_type = genomic DNA
agagtttgatcctggctcaggatgaacgctggcggcgtgcctaacacatgcaagtcgaacggttaagccggcttcggccgggaatacagtggcgaacgggtgagtaacacgtgaccaacctgccccccgcaccgggacagccccgcgaaagcgcggttaataccggatatgcccccgcgcccgcatgggagcggggggaaagcccaggcggcgggggatggggtcgcggcccatcaggtagtaggcggggcagcggcccgcctagccgacgacgggtagccgggttgagagaccgaccggccacattgggactgagatacggcccagactcctacgggaggcagcagtggggaatattgcgcaatgggggcagccctgacgcagcaacgccgcgtgcgggacgaaggcgtccgcgtcgtaaaccgctttcagcagggaagatgacgacggtacctgcagaagaagccccggctaactacgtgccagcagc

SEQ ID NO: 8548 - DNA, 490 bp, unidentified
  misc_feature 1..490: note = Ascusbbf_1808165, encodes 16S rRNA
  source 1..490: mol_type = genomic DNA
agagtttgatcatggctcaggacgaacgctggcggcgtgcctaatacatgcaagtcgaacgcttttttcaatcatcgtagcttgctacaccgattgaaaattgagtggcgaacgggtgagtaacacgtgggtaacctgcccaaaagagggggataacacttggaaacaggtgctaataccgcataaccatgatgaccgcatggtcattatgtaaaagatggtttcggctatcacttttggatggacccgcggcgtattaacttgttggtggggtaacggcctaccaaggtaatgatacgtagccgaactgagaggttgatcggccacattgggactgagacacggcccaaactcctacgggaggcagcagtagggaatcttccacaatgggcgcaagcctgatggagcaacgccgcgtgagtgaagaaggtcttcggatcgtaaaactctgttgttagagaagaacatgcgagagagtaactgttcttgt

SEQ ID NO: 8549 - DNA, 490 bp, unidentified
  misc_feature 1..490: note = Ascusbbf_1586330, encodes 16S rRNA
  source 1..490: mol_type = genomic DNA
agagtttgatcatggctcagattgaacgctggcggcatgcttaacacatgcaagtcgaacggcagcatagcctagcttgctaggttgatggcgagtggcgaacgggtgagtaacgcgtaggaatatgccctggagagggggataacttggggaaactcaagctaataccgcatgaactctgaggagcgaagctggggaccttagggcctggcgcttcaggaatagcctgcgtctgattagctagttggtggggtaagggcctaccaaggcgacgatcggtagctggtctgagaggatgatcagccacactgggactgagacacggcccagactcctacgggaggcagcagtggggaatattggacaatggggggaaccctgatccagcaatgccgcgtgtgtgaagaaggcctgagggttgtaaagcacttttgttggggaggagtcttggatggttaagagctgtttaagaggacgttacccaaagaat

SEQ ID NO: 8550 - DNA, 490 bp, unidentified
  misc_feature 1..490: note = Ascusbbf_186563, encodes 16S rRNA
  source 1..490: mol_type = genomic DNA
agagtttgatcatggctcaggacgaacgctagcgacgtgtctaagaaatgcaagtcgagcgatgacggaggcttcggtctcccgattagcggcgaacggtcgcgtaacacgtaagcaatctgccccaaagtttgggatagcccggcgaaagtcggattaataccggatgtggacagggtttcgcatggagcccggtctaaagcagcaatgcgctttgggatgagcttgcggcctatcagcttgatggcggggtaacggcctgccatggcgacgacgggtagctggtctgagaggatggtcagccggactgggactgagatacggcccagactcctacggggggcagcaattaagaatcttgcgcaatgggggcaaccctgacgcagcgacgtcgcgtgaacgatgaattctttcgggatgtaaagttcttttgtcagggaagagtaatagactgtacctgacgaataagccccggctaactacgtgccag

SEQ ID NO: 8551 - DNA, 490 bp, unidentified
  misc_feature 1..490: note = Ascusbbf_212387, encodes 16S rRNA
  source 1..490: mol_type = genomic DNA
agagtttgatcatggctcaggatgaacgctggcggcgtgcctaacacatgcaagtggagcgacgaacccggacttgtccgggggcaaagccgcgaacgggtgagtaacacgtggattatctgccccaatgaccgggacaactcgaggaaactcgagctaataccggatgtgctcttcggaggaaaggaagcttcggcctccgcattgggatgagtccgcggcgcattagctagttggtgaggtaaaggctcaccaaggcgacgatgcgtagctggtctgagaggacgatcagccacactggaactgagacacggtccagactcctacgggaggcagcagtggggaatcttgcgcaatgcacgaaagtgtgacgcagcaacgccgcgtgcgggaagaaggtcttcggatcgtaaaccgctttcagttgggacgagggttacacggtgaatagccggcgtaactgacggtaccttcagaagaagccccggct

SEQ ID NO: 8552 - DNA, 490 bp, unidentified
  misc_feature 1..490: note = Ascusbbf_685612, encodes 16S rRNA
  source 1..490: mol_type = genomic DNA
agagtttgatcctggctcaggatgaacgctggcggcgtgcttaacacatgcaagtcgaacggagagcccatgacggagttttcggacaactgattgggtttcttagtggcggacgggtgagtaacgcgtgagtaacctgcctgggagcggggaataacacagtgaaaattgtgctaataccgcataatgcagttgtgccgcatggtactgactgccaaagatttatcgctcttagatggactcgcgtctgattagatagttggcggggtaacggcccaccaagtcgacgatcagtagccggactgagaggttggccggccacattgggactgagacacggcccagactcctacgggaggcagcagtggggaatattgggcaatgggcgcaagcctgacccagcaacgccgcgtgaaggaagaaggctttcgggttgtaaacttcttttatcagggacgaattttgacggtacctgatgaataagccacgg

SEQ ID NO: 8553 - DNA, 490 bp, unidentified
  misc_feature 1..490: note = Ascusbbf_1045362, encodes 16S rRNA
  source 1..490: mol_type = genomic DNA
agagtttgatcctggctcaggacgaacgctagcgacgtgtctaagaaatgcaagtcgagcgatgacggaggcttcggcctcccgattagcggcgaacggtcgcgtaacacgtaagcaatctgccccaaagttcgggatagcccggcgaaagtcggattaataccggatgtggatgtttttgcgcatgcatttgcatctaaagcagcgatgcgctttgggatgagcttgcggcctatcagcttgatggcggggtaacggtctgccatggcgacgacgggtagctggtctgagaggatggtcagccggactgggactgagatacggcccagactcctacggggggcagcaattaagaatcttgcgcaatgggggaaaccctgacgcagcgacgtcgcgtgaatgatgaagtctttcgggatgtaaagttcttttgtcggggaagagtaacagactgtacccgacgaataagccccggctaactacgtgccag

SEQ ID NO: 8554 - DNA, 490 bp, unidentified
  misc_feature 1..490: note = Ascusbbf_543579, encodes 16S rRNA
  source 1..490: mol_type = genomic DNA
agagtttgatcctggctcaggacgaacgctggcggtatgcttaagacatgcaagtcgaacgagcgattgagtgtgcttgcacattcaaaagcgagtggcggacgggtgagtaacgcgtgagcaacctgcctctttcaacgggataccaattggaaacgattgttaataccgtatatgaccacagcatcgcatggtgcaggggtgaaagggtttactggaaagagatgggctcgcgtctgattagctagttggtggggcaacggcctaccaaggcgacgatcagtagccgacctgagagggtgatcggccacattgggactgagaacggcccagactcctacgggaggcagcagtcgggaatattgggcaatggaggaaactctgacccagcaataccgcgtgagggatgaaggttttcggattgtaaacctctgttataaaggaagaaacaaatgacggtactttataagtaagccccggcaaactatgt

SEQ ID NO: 8555 - DNA, 490 bp, unidentified
  misc_feature 1..490: note = Ascusbbf_1372204, encodes 16S rRNA
  source 1..490: mol_type = genomic DNA
agagtttgattatggctcaggacgaacgctggcggcgtgcttaacacatgcaagtcgaacggtgaagggagcttgctcccggatcagtggcgaacgggtgagtaacacgtgagcaacctacccttgactctgggataacagttggaaacagctgctaataccggatacgaccctggcgggcatctgccggggtggaaagctccgacggtcaaggatgggctcgcggcctatcagcttgttggtggggtaacggcccaccaaggcgccgacgggtagccggcctgagagggcgaccggccaaactgggacagagatacggcccagactcctacgggaggcagcagtggggaatattgcacaatgggcgaaagcctgatgcagcaacgccgcgtgcgggatgacggccttcgggttgtaaaccgctttcagcagggacgaagggtttctgacggtacctgcagaagaagcaccggctaactacgtgccagca

SEQ ID NO: 8556 - DNA, 490 bp, unidentified
  misc_feature 1..490: note = Ascusbbf_1246149, encodes 16S rRNA
  source 1..490: mol_type = genomic DNA
agagtttgatcctggctcaggacgaacgctggcggcgtgcctaacacatgcaagtcgaacgagaatttatcggcagaattcttcggaatgaagctggtaaaggaaagtggcggacgggcgagtaacgcgtgaataacctgcccataagagggggataatccatggaaacgtggactaataccgcatattgaatggagttcgcatgaacatcatttgaaagattatatcgcttatggatggattcgcgtcagattagatagttggagaggtaacggctcaccaagtcgacgatctgtagccgaactgagaggttgatcggccgcattgggactgagacacggcccagactcctacgggaggcagcagtggggaatattgcgcaatgggggcaaccctgacgcagcaacgccgcgtgcaggaagaaggtcttcggattgtaaactgttgtcgcaagggaagaataaaatgacggtaccttgtgagaaagtca

SEQ ID NO: 8557 - DNA, 490 bp, unidentified
  misc_feature 1..490: note = Ascusbbf_921101, encodes 16S rRNA
  source 1..490: mol_type = genomic DNA
agagtttgatcctggctcaggacgaacgctggcggcgtgcttaacacatgcaagtcgaacgaggtgcagcgagttgaagcttcggcggaaacatgctgttaccgagtggcggacgggtgagtaacgcgtgagcaacctgccctgcaacgggggacaacagttggaaacgactgctaataccgcatgagaccacggtttcgcatggaactgaggtaaaaggatttattcgatgcaggatgggctcgcgtcccattagatagttggtgaggtaacggctcaccaagtcaacgatgggtagccgacctgagagggtgatcggccacactggaactgagacacggtccagactcctacgggaggcagcagtggggaatattgggcaatgggcgaaagcctgacccagcaacgccgcgtgagggaagaaggtcttcggattgtaaacctttgtcctatgggacgaaacaaatgacggtaccataggaggaagctc

SEQ ID NO: 8558 - DNA, 490 bp, unidentified
  misc_feature 1..490: note = Ascusbbf_1162518, encodes 16S rRNA
  source 1..490: mol_type = genomic DNA
agagtttgatcatggctcaggacgaacgctggcggcgcgcctaacacatgcaagtcgaacgggactagtgactggagctaagaagttttcttggttgcattcactagttcagtggcggacgggtgagtaaagcatgagtaacttgcccattagtggggaatagcttttggaaacagaagataataccgcataattcggtttggacacatgttcggaccggaaaagaagcaattcgctaatggataggctcatgtctgattagcttgttggtgaggtaatggcttaccaaggccatgatcagtagccgtaccgagaggttcaacggccacattgggactgagacacggcccagactcctacgggaggcagcagtgaggaatattgcgcaatggaggaaactctgacgcagcgacgccgcgtgaaggaagaaggtcttcggattgtaaacttctgtcttcagggaagaaataaatgacggtacctggggagg

SEQ ID NO: 8559 - DNA, 490 bp, unidentified
  misc_feature 1..490: note = Ascusbbf_765018, encodes 16S rRNA
  source 1..490: mol_type = genomic DNA
agagtttgatcatggctcaggatgaacgctagctacaggcttaacacatgcaagtcgaggggcatcatgggattggtttcggccgatcctgatggcgaccggcggacgggtgagtaacgcgtatccaacctgcccctgtcccgcggacagcccttagaaatgaggattaacccgcgatgttgcccgattgccgcatggtgattgggtgaaatgcctaaggacggggatggggatgcgttccattagcttgcaggcggggtgacggcccacctgggcgacgatggataggggttctgagaggaaggtcccccacactggaactgagacacggtccagactcctacgggaggcagcagtgaggaatattggtcaatgggcgcgagcctgaaccagccaagtagcgtgcgggaggaaggccctacgggttgtaaaccgcttttgtccggggataacgtgcgccacgtgtggtgtattgcaggtaccgggcgaa

SEQ ID NO: 8560 - DNA, 490 bp, unidentified
  misc_feature 1..490: note = Ascusbbf_1435746, encodes 16S rRNA
  source 1..490: mol_type = genomic DNA
agagttgatcctggctcaggatgaacgctagcggcaggcttaacacatgcaagtcgaggggcagcgcggggtagcaatactctgtcggcgaccggcggaagggtgcgtaacgcgtgagcaacttgcccgtcactgggggataggcactggacacggtgtgtaatactccataacatatggattcacatggatttatattgaaagattcgttggtgacggatgggctcgcgtaacattagctagtcggcggggtaacggcccaccgaggctacgatgtttaggggttctgagaggaaggtcccacacacgggacctcggacccggtcaagacgcctacgggaggcagaagtgaggaatagtgggcaatgggcggaagcctgaaccagccatgccgcgtgcaggaataaggccctatgggtcgtaaactgcttttccttgagggcaagaagggtcacgagtggcccgatgagagtatcaggggaataagcat

SEQ ID NO: 8561 - DNA, 490 bp, unidentified
  misc_feature 1..490: note = Ascusbbf_1512822, encodes 16S rRNA
  source 1..490: mol_type = genomic DNA
agagtttgatcctggctcaggatgaacgctagcggcaggcctaacacatgcaagtcgaggggtaaggttacttcggtagcctgagaccggcgcacgggtgcgtaacgcgtatgcaatctaccttttactatgggatagcccagagaaatttggattaataccatatagtatatccgaatggcatcgtttgaatattaaagatttatcggtaaaagatgagcatgcgtcccattagttagttggtgtggtaacggcacaccaagacgatgatgggtaggggtcctgagagggagatcccccacactggtactgagacacggaccagactcctacgggaggcagcagtgaggaatattggtcaatggaggcaactctgaaccagccatgccgcgtgcaggatgacggtcctatggattgtaaactgcttttgtacgggaagaaaacaaactacgcgtagttaattgacggtaccgtaagaataaggatcggc

SEQ ID NO: 8562 - DNA, 490 bp, unidentified
  misc_feature 1..490: note = Ascusbbf_1434706, encodes 16S rRNA
  source 1..490: mol_type = genomic DNA
agagtttgatcctggctcaggatgaacgctagcggcaggcttaacacatgcaagtcgaggggcagcgcggggtagcaatactctggcggcgaccggcggaagggtgcgtaacgcgtgtgcaacttgcccgtcactgggggataggcactggaaacggtgtgtaatactccataacatatggattcacatggattcatattgaaagagtcgttgttgacggatgggcccgcgtcacatgagctagtcggcggtgaaacggcccaccgaggctacgatgtttaggggttctgagaggaaggtcccccacacgggaactgagacacggtccagactcctacgggaggcagcagtgaggaatagtggtcaatgggcggaagcctgaaccagccaagccgcgtgcaggaataaggccctatgggtcgtaaactgcttttcctcgagagcaataagggtcacgagtggcccgatgagagtatcaggggaataagca

SEQ ID NO: 8563 - DNA, 490 bp, unidentified
  misc_feature 1..490: note = Ascusbbf_1588633, encodes 16S rRNA
  source 1..490: mol_type = genomic DNA
agagtttgatcatggctcaggacgaacgctggcggcgtgcctaacacatgcaagtcgagcggaggtaactagaggaagttttcggatggaatctggttactttagcggcggacgggtgagtaacgcgtgagcaacctgcctttcacagggggataacggatcgaaagattcactaataccgcatgagaccacgggggtgcatactccaggggtcaaaggagcaatccggtgaaagatgggctcgcgtccgattagatagttggtggggtaacggcctaccaagtcaacgatcggtagccgacctgagagggtgatcggccacactggaactgagagacggtccagactcctacgggaggcagcagtggggaatattgggcaatgggggaaaccctgacccagcaacgccgcgtgagggaagaaggttttcggattgtaaacctctgtccttggtgaagagaggaagacggtagccaaggaggaagccccg

SEQ ID NO: 8564 - DNA, 490 bp, unidentified
  misc_feature 1..490: note = Ascusbbf_1372667, encodes 16S rRNA
  source 1..490: mol_type = genomic DNA
agagtttgatcatggctcaggacgaacgctggcggcgtgcctaacacatgcaagtcgagcggagccaatcggacaaacccttcggggtgcgtttgaggaagcttagcggcggacgggtgagtaacgcgtgagtaacctgcccataagagggggataacacagagaaatttgtgctaataccccatattgaattagaatcgcatggttttaatttgaaagatttatcgcttatggatggactcgcgtctgattagatagttggcggggtaacggcccaccaagtcgacgatcagtagccgaactgaggggtagagcggccacattgggactgagacacggcccagactcctacgggaggcagcagtgggggatattgcgcaatgggggaaaccctgacgcagcaacgccgcgtgaaggaagaaggctttcgggttgtaaacttctgttcttagggaagaagacagtgacggtacctaaggagcaagtcacg

SEQ ID NO: 8565 - DNA, 490 bp, unidentified
  misc_feature 1..490: note = Ascusbbf_1406985, encodes 16S rRNA
  source 1..490: mol_type = genomic DNA
agagtttgatcctggctcaggatgaacgctagcggcaggcctaacacatgcaagtcgaggggtagagttgtgcttgcacaacttgagaccggcaaacgggtgcggaacacgtacgcaatctgcccttatcacgggaatagcccagagaaatttggattaatgcccgatagtattattgagaggcatcttttaataattaaagatttattggataaggatgagcgtgcgcaagattagctagttggtgaggtaacggctcaccaaggcgacgatctttagctgatgtgagagcatgatcagccacacgggcactgagacacgggcccgactcctacgggaggcagcagtgaggaatattggtcaatggacggaagtctgaaccagccatgccgcgtgaaggatgaaggcgttctgcgttgtaaacttcttttatcaggggagaaaccacagatttctatttgtgttgacggtacctgatgaataagcaccg

SEQ ID NO: 8566 - DNA, 490 bp, unidentified
  misc_feature 1..490: note = Ascusbbf_1360041, encodes 16S rRNA
  source 1..490: mol_type = genomic DNA
agagtttgatcctggctcagattgaacgctggcggcatgcttaacacatgcaagtcgaacggcagcacggtctagcttgctagatgggtggcgagtgccgaacgggtgagtaacgcgtgggaatatgccttgaagagggggataacttggggaaactcaagctaataccgcatacgctctgaggagcaaagctagggaccttcgggcctggcgctttgagaatagcctgcgtccgattagctagttggtagggtaaaggcctaccaaggcgacgatcggtagctggtctgagaggacgaacagccacactgggactgagaaacggcccagactcctacgggaggcagcagtggggaatattggacaatgggggcaaccctgatccagcaatgccgcgtgtgtgaagaaggcctgagggttgtaaagcactatcagtggggaggaggattgattggttaagagctgattaattggacgttacccacagaag

SEQ ID NO: 8567 - DNA, 490 bp, unidentified
  misc_feature 1..490: note = Ascusbbf_868701, encodes 16S rRNA
  source 1..490: mol_type = genomic DNA
agagtttgatcctggctcaggacgaacgctggcggcgcgcctaacacatgcaagtcgagcgagaaccagggcttcggccctggggacagcggcgaacgggtgagtaacacgtggataacctgccctcggcaccggaatagcccggggaaacccggattaatgccggatggccccacatccctgcggggaacgtgggaaaaggtagcttcggcctctggccgaggatgggtccgcggtggattagcttgttggtggggtaatggctcaccaaggcgacgatccatagctggtctgagaggacgatcagccacactgggactgggacacggcccagactcctacgggaggcagcagtggggaatcttgtgcaatgggcgaaagcctgacgcagcgacgccgcgtgcgggaagaaggccttcgggttgtaaaccgctttcaggagggacgaagccactcgggtgaatagcccagagggtgacggtacctccag

SEQ ID NO: 8568 - DNA, 490 bp, unidentified
  misc_feature 1..490: note = Ascusbbf_1043879, encodes 16S rRNA
  source 1..490: mol_type = genomic DNA
agagtttgatcatggctcaggacgaacgctggcggcgtgcttaacacatgcaagtcgagcggaaaggctccttcgggggtactcgagcggcgaacgggtgagtaacacgtgagtaatctgccctccactctgggataacgttcagaaatgggtgctaataccggatgtacacaggctgacgcatgttggtgtgtggaaaggtttttctggtaggggatgtgctcgcggcctatcagcttgttggtggggtaatggcctaccaaggctttgacgggtagccggcctgagagggtgaccggccacactgggactgagacacggcccagactcctacgggaggcagcagtggggaatattggacaatgggcggaagcctgatccagcaacgccgcgtgagggatgacggccttcgggttgtaaacctctttcaccattgacgaagctgcatctttttgggtgtggtgacggtaggtggggaagaagcaccggc

SEQ ID NO: 8569 - DNA, 490 bp, unidentified
  misc_feature 1..490: note = Ascusbbf_253777, encodes 16S rRNA
  source 1..490: mol_type = genomic DNA
agagtttgatcatggctcagagtgaacgctggcggcgtggttaagacatgcaagtcgagcgggatttatcatcatgagtcttcggatgaatgaggatgatgagagcggcaaacgggtgcgtaacacgtaaacaacttgccccctagtccgggatagctcaccgaaaggtggattaataccggatgcggttttctttcgcatggaagagatactaaagcttgtaatggcgctaagggagaggtttgcgtcctatcagcttgttggtgaggtaaaggcttaccaaggctaagacgggtagctggtctgagaggatgatcagccacagtggaactgagacacggtccacacacctacgggtggcagcagtttcgaatcattcacaatgggcaaaagcctgatggtgcaacgccgcgtgggggatgaaggttctcgaatcgtaaacccctgtcgccgaggaacaaaatccgggttcatagcccggcttgagtta

SEQ ID NO: 8570 - DNA, 490 bp, unidentified
  misc_feature 1..490: note = Ascusbbf_11559, encodes 16S rRNA
  source 1..490: mol_type = genomic DNA
agagtttgatcatggctcagaacgaacgctggcggcatggattaggcatgcaagtcgaacggaagtagcaatacttcagtggcggaagggtgaggaacgcgtgagtaatctgccctcaagttgggaataacagctggaaacggctgctaataccgaatgtggctgtggaattgcatgattttacggctaaagctttatgtgcttgaggatgagctcgcgtcccattagcttgttggtgaggtaacggctcaccaaggcgatgatgggtagctggtctgagaggatggtcagccacactggaactgagacactgtccagactcctacgggaggctgcagtcgagaatcttgggcaatgcgcgaaagcgtgacccagcaatgccgcgtgtgtgacgaaggtcttcggattgtaaaacactgtctcccgtgacgaaagatgacggtagcggggaaggaagccacggctaactacgtgccagcagccgcggtaa

SEQ ID NO: 8571 - DNA, 490 bp, unidentified
  misc_feature 1..490: note = Ascusbbf_471207, encodes 16S rRNA
  source 1..490: mol_type = genomic DNA
agagtttgatcatggctcaggatgaacgctagctacaggcttaacacatgcaagtcgaggggcagcgggagagtagcttgctactcttgccggcgaccggcgcacgggtgagtaacacgtatccaacctgccctgaaccccgggatagccctctgaaaggaggattaataccggatgtggccgctgggggacatcccctggcgtctaaagattcatcggttttggatggggatgcgtctgattagcttgtcggcggggtaacggcccaccgaggcaccgatcagtaggggttctgagaggaaggtcccccacataggaactgagacacggtcctaactcctacgggaggcagcagtgaggaatattggtcaatgggcgagagcctgaaccagccaagtagcgtgagggacgactgccctatgggttgtaaacctcttttatgcgggaataacgggagccacgcgtggctttgtgcatgtaccgcatgaat

SEQ ID NO: 8572 - DNA, 490 bp, unidentified
  misc_feature 1..490: note = Ascusbbf_107752, encodes 16S rRNA
  source 1..490: mol_type = genomic DNA
agagtttgatcctggctcagagtgaacgctggcggcgtggttaagacatgcaagtcgaacgggattttctgttaagattcttcggatgattaatagagatgagagtggcaaacgggtgagtaacacgtaaataacttgccccttagtttgggatagctcgttgaaagacgaattaataccggatgtggttttcttctgatggaagagatactaaagcttgtgatggcgctaagggagaggtttacggcctatcagcttgttggcaaggtaatggcttaccaaggcaaagacgggtagctggtctgagaggatgatcagccacattggaactgagacacggtccagacacctacgggtggcagcagtttcgaattattcacaatggacgaaagtctgatggtgcaacgccgcgtgggggatgaaggttctcgaattgtaaacccctgtcgctgaggagtaaaggttaggttcatagcttaatttgaattaa

SEQ ID NO: 8573 - DNA, 490 bp, unidentified
  misc_feature 1..490: note = Ascusbbf_183949, encodes 16S rRNA
  source 1..490: mol_type = genomic DNA
agagtttgatcatggctcagaacgaacgctggcggtgcgtcttaagcatgcaagtcgaacgggattcagcagcttgctgttgatgagagtggcggactggtgagtaacacgtgggtgacataccctcctgacggggatagcctttagaaataaggggtaataccggatacgcacgtacaggttagaggtgtacgtggaaagggagcttcggctccgcgggaggaatggcttgcggcccattagctggttggtgtggtaacggcgcaccaaggcgatgatgggtatccggcctgagagggtgaacggacacattgggactgagatacggcccagactcctacgggaggcagcagctaagaatattccgcaatggacggaagtctgacggagcgacaccgcgtgaatgaagaaggccggaaggttgtaaagtgcttttgaatgtgaagaataagcaggtcaggtaatgggcgtgcggtgacggtagcatttg

SEQ ID NO: 8574 - DNA, 363 bp, unidentified
  misc_feature 1..363: note = Ascusbbf_314243, encodes 16S rRNA
  source 1..363: mol_type = genomic DNA
agagtttgatcatggctcagaacgaacgctggcggcgcgtcttaagcatgcaagtcgaacggcaagattggtgcttgcaccgatcctagagtggcggactggtgagtaacacgtgggtgacgtaccctctgaatggggatagccggtagaaataccggataataccgaataaccttgcacctttagagtggtgtaagaaaaggagcttcggcttcgtcggaggaacggcccgcgcactattagctagttggtgaggtaacggcccaccaaggcgacgatagttatccggcctaagagggtgaacggacacattgggactgagatacggcccagactcctacgggagccagcagccgcggtaat

SEQ ID NO: 8575 - DNA, 490 bp, unidentified
  misc_feature 1..490: note = Ascusbbf_175340, encodes 16S rRNA
  source 1..490: mol_type = genomic DNA
agagtttgatcatggctcaggatgaacgctggcggcgtgcctaatacatgcaagtagaacgctgaagcttggtgcttgcaccgagcggatgagttgcgaacgggtgagtaacgcgtaggtaacctgcctggtagcgggggataactattggaaacgatagctaataccgcataacagtagatattgcatgatatctgcttgaaaggtgcaattgcatcactaccagatggacctgcgttgtattagctagttggtgaggtaacggctcaccaaggcgacgatacatagccgacctgagagggtgatcggccacactgggactgagacacggcccagactcctacgggaggcagcagtagggaatcttcggcaatggggggaaccctgaccgagcaacgccgcgtgagtgaagaaggttttcggatcgtaaagctctgttgtaagagaagaacgagtgtgagagtggaaagttcacactgtgacggtatct

SEQ ID NO: 8576 - DNA, 490 bp, unidentified
  misc_feature 1..490: note = Ascusbbf_200806, encodes 16S rRNA
  source 1..490: mol_type = genomic DNA
agagtttgatcctggctcaggacaaacgctggcggcgtgcctaatacatgcaagtcgaacgagaatctctggcttgccagagaggaaagtggcggacgggtgagtaatatgtaggaaatctgccctcaagagggggacaacagttggaaacgactgctaataccccatatgagcttagttgaaatactaatcttgaaatgatttttcgcttgaggatgagcctgcatctgattagcttgttggtggtgtaatggactaccaaggcgacgatcagtagctggtttgagaggatgatcagccacaatgggactgagacacggcccatactcctacgggaggcagcagtagggaattttgcgcaatgggcgaaagcctgacgcagcaacgccgcgtgagtgatgaagcccctcggggtgtaaaactctgtcagtagggacaaattctgatggtacctacagaggaagcatcggctaactacgtgccagcagcc

SEQ ID NO: 8577 - DNA, 470 bp, unidentified
  misc_feature 1..470: note = Ascusbbf_166141, encodes 16S rRNA
  source 1..470: mol_type = genomic DNA
agagtttgatcatggctcagaacgaacgctggcggcaggcttaacacatgcaagtcgaacgcatccttcggggtgagtggcagacgggtgagtaacgcgtgggaacctacctttaggtctggaataactgagggaaacttcagctaataccggatagacccgtgagggtaaagatttatcgcctgaagatgggcccgcgcaggattagctagttggtggggtaaaggcctaccaaggcgacgatccttagctggtctgagaggatgatcagccacactgggactgagacacggcccagactcctacgggaggcagcagtggggaatattggacaatgggcgcaagcctgatccagccatgccgcgtgagtgatgaaggccctagggttgtaaagctctttcgcacgtgacgataatgacggtagcgtgagaagaagccccggctaacttcgtgccagcagccgcggtaat

SEQ ID NO: 8578 - DNA, 490 bp, unidentified
  misc_feature 1..490: note = Ascusbbf_286346, encodes 16S rRNA
  source 1..490: mol_type = genomic DNA
agagtttgatcctggctcaggacgaacgctggcggcgtgcttaacacatgcaagtcgaacgaggatgattccttcggggatcattcgagtggcggacgggtgagtaacgcgtgaacaatctgtccttcaaagggggataccaactggaaacagttgctaataccgcataagaccacggtatcgcatggtactgaggtaaaagatgaaagtcgatggagggtgagttcgcgtctgattaggcagttggcggggtaaaggcccaccaaaccgacgatcagtagccgacctgagagggtgaccggccacattgggactgagacacggcccagactcctacgggaggcagcagtgggaatattgggcaatgggcgaaagcctgacccagcaacgccgcgtgagggaagaaggttttcggattgtaaacctctgtcctaaaggacgaaggaagtgacggtactttaggaggaagccccggctaactacgtgccag

SEQ ID NO: 8579 - DNA, 470 bp, unidentified
  misc_feature 1..470: note = Ascusbbf_254126, encodes 16S rRNA
  source 1..470: mol_type = genomic DNA
agagtttgatcatggctcagaacgaacgctggcggcaggcctaacacatgcaagtcgaacgccgtagcaatacggagtggcagacgggtgagtaacgcgtgggaaccttcccaatggtacggaataactcagggaaacttgtggtaataccgtatacgcccgaaaggggaaagatttatcgccattggatgggcccgcgtcggattagctagttggtgaggtaatggctcaccaaggctacgatccgtagctggtttgagagaatgaccagccacactgggactgagacacggcccagactcctacgggaggcagcagtggggaatattggacaatgggcgcaagcctgatccagccatgccgcgtgagtgacgaaggccttagggttgtaaagctcttttggcggggacgataatgacggtacccgcagaataagccccggctaacttcgtgccagcagccgcggtaat

SEQ ID NO: 8580 - DNA, 490 bp, unidentified
  misc_feature 1..490: note = Ascusbbf_1583309, encodes 16S rRNA
  source 1..490: mol_type = genomic DNA
agagtttgatcatggctcaggatgaacgctagcgacaggcttaacacatgcaagtcgaggggcagcgggattgaagcttgcttcaattgccggcgaccggcgcacgggtgagtaacacgtatgcaacctgcccgccacaggggaataaccggaagaaattccgactaattccgcgtaacacctcagggaggcatcttcccgaggtcaaaggagcaatccggtggcggatgggcatgcggcgcattagctagtcggcggggtaacggcccaccgaggcgacgatgcgtaggggttctgagaggaaggtcccccacactggtactgagacacggaccagactcctacgggaggcagcagtgaggaatattggtcaatgggcgggagcctgaaccagccaagtcgcgtgagggaagacggccctacgggttgtaaacctcttttgtcagggagcaagaacaggcacgtgtgcctgactgagagtacctgaaga

SEQ ID NO: 8581 - DNA, 490 bp, unidentified
  misc_feature 1..490: note = Ascusbbf_692999, encodes 16S rRNA
  source 1..490: mol_type = genomic DNA
agagtttgatcctggctcagattgaacgctggcggcaggcctaacacatgcaagtcgagcggcagcgggaggaagcttgcttcctcgccggcgagcggcggacgggtgagtaatgtctggggatctgcccgatggagggggataaccactggaaacggtggctaataccgcataacgtcgcaagaccaaagtgggggaccttcgggcctcacaccatcggatgaacccagatgggattagctagtaggtggggtaatggctcacctaggcgacgatccctagctggtctgagaggatgaccagccacactggaactgagacacggtccagactcctacgggaggcagcagtggggaatattgcacaatgggcgcaagcctgatgcagccatgccgcgtgtgtgaagaaggccttcgggttgtaaagcactttcagcgaggaggaaggtggtgagcttaatacgctcatcaattgacgttactcgcagaag

SEQ ID NO: 8582 - DNA, 490 bp, unidentified
  misc_feature 1..490: note = Ascusbbf_543334, encodes 16S rRNA
  source 1..490: mol_type = genomic DNA
agagtttgatcatggctcaggacgaacgctggcggcgtgcttcatacatgcaagtcgaacgagaagccgacttcggttggtggaaagtggcggacgggtgagtaatatgtagagaatctgccctggagagtgggacaacagttggaaacggctgctaataccgcatatgagcgtacctgtaatggtattcttgaaatgatttatcgctccgggatgagtctgcatctgattagctagttggcggtgtaatggaccaccaaggcgacgatcagtagctggtttgagaggatgatcagccacaatgggactgagacacggcccatactcctacgggaggcagcagtagggaattttgcgcaatgggggaaaccctgacgcagcaacgccgcgtgaacgaataagcccttcggggtgtaaagttctgtcagtagggacgaaacttgacggtacctacagaggaagcatcggctaactccgtgccagcagccgc

SEQ ID NO: 8583 - DNA, 490 bp, unidentified
  misc_feature 1..490: note = Ascusbbf_489291, encodes 16S rRNA
  source 1..490: mol_type = genomic DNA
agagtttgatcatggctcaggacgaacgctggcggcgtgcttaacacatgcaagtcgaacggtaaggcgccttttggtgtacacgagtggcgaacgggtgagtaacacgtgaggaacgtgcccttgactttggtatagcacttggaaacaggtggtaatcccgaatattcagtttcccgggcatccggggggttggaaagcttttgcggtcagggatcgtctcgcggcctatcagcttgttggtggggtagtggcctaccaaggctttgacgggtagccggcctgagagggcgaccggccacattgggactgagatacggcccagactcctacgggaggcagcagtgggaatattgcacaatgggcggaagcctgatgcagcaacgccgcgtgcgggatgacggccttcgggttgtaaaccgctttcacccatgacgaagcttttgtgacggtagtgggggaagaagcaccggccaactacgtgccagca

SEQ ID NO: 8584 - DNA, 490 bp, unidentified
  misc_feature 1..490: note = Ascusbbf_1232497, encodes 16S rRNA
  source 1..490: mol_type = genomic DNA
agagtttgatcatggctcaggatgaacgctggcggcgtgcttaacacatgcaagtcgagcgagaaatgacagatggattcttcggatgacagaagtcatggacagcggcggacgggtgagtaacgcgtgggcaacctgcccctgactgagggatagccgagggaaacttcgagtaatacctcataacgcataactgtcgcatggcagatatgccaaagatttatcggtcagggatgggcccgcgttcgattagctagttggtgaggcagcggctcaccaaggcgacgatcggtagccggcctgagagggtgaacggccacatgagaactgagacacggtccagactcctacgggaggcagcagtggggaatattgcacaatgggcgaaagcctgatgcagcaacgccgcgtgaaggaagaaggtcttcggatcgtaaacttctgtcctaggggaagaaacaaatgacggcacccttggaggaagccccgg

SEQ ID NO: 8585 - DNA, 490 bp, unidentified
  misc_feature 1..490: note = Ascusbbf_1143401, encodes 16S rRNA
  source 1..490: mol_type = genomic DNA
agagtttgatcatggctcaggacgaacgctggcggcgtgcctaacacatgcaagtcgaacgaagctccgaaagcaacggtttcggccggagtggacggatgacttagtggcggacgggtgagtaacgcgtgagcaacctgcccttcagagggggacaacagttggaaacgactgctaataccgcataacgtaaggaaatggcatcatattcttaccaaagatttatcgctgaaggatgggctcgcgtctgattagcttgatggtggggtaaaggcctaccatggcgatgatcagtagccggactgagaggttgaacggccacattgggactgagatacggcccagactcctacgggaggcagcagtggggaatattgggcaatgggggaaaccctgacccagcaacgccgcgtgaaggaagaaggctttcgggttgtaaacttcttttgtcggggacgaagtaagtgacggtacctgacgaataagccac

SEQ ID NO: 8586 - DNA, 490 bp, unidentified
  misc_feature 1..490: note = Ascusbbf_395345, encodes 16S rRNA
  source 1..490: mol_type = genomic DNA
agagtttgatcatggctcagaatgaacgctggcggcatggattaggcatgcaagtcgaacgagcgcgccctcgggcgcgaaagtggcgaaagggtgagtaacacgtgagcaacccgcccccggatccggaacaagccttggaaacgaggtctgaaaccggatgttgcctcgggaccgcatggtcccggggcgaaaaattccattgtccggggaagggctcgcggcccattagcttgttggcggggtgacggcccaccaaggcgacgacgggtaggtggtctgagaggatggtcacccacactgggactgagacactgcccagactcctacgggaggctgcagtcgagaatcttccgcaatgggcgcaagcctgacggagcgatgccgcgtgagggaagaaggccctcgggtcgtaaacctctgtcatccgggacgaagcaatgacggtaccggaggaggaagccacggctaaccacgtgccagcagccgc

SEQ ID NO: 8587 - DNA, 490 bp, unidentified
  misc_feature 1..490: note = Ascusbbf_698504, encodes 16S rRNA
  source 1..490: mol_type = genomic DNA
agagtttgatcctggctcaggacgaacgctggcggtatgcttaagacatgcaagtcgaacgaggttgatattagtagcaatactgagatcaaccgagtggcggacgggtgagtaacgcgtgagcaacctgcctctttcactgggataccaattggaaacgattgttaataccggatatgaccacagcatcgcatggtgcaggggtgaaagggtttactggaaagagatgggctcgcgtctgattagctagttggtagtgtaacggactaccaaggcgatgatcagtagccgacctgagagggtgatcggccacattgggactgagaacggcccagactcctacgggaggcagcagtcgggaatattgggcaatggagggaactctgacccagcaataccgcgtgaaggaagaaggttttcggattgtaaacttctgttataaaggaagaaacaaatgacggtactttataagtaagccccggcaaactat

SEQ ID NO: 8588 - DNA, 361 bp, unidentified
  misc_feature 1..361: note = Ascusbbf_1112763, encodes 16S rRNA
  source 1..361: mol_type = genomic DNA
agagtttgatcatggctcaggatgaacgctagcggcaggcttaacacatgcaagtcgaggggtagcgagaggtagcaatactttgtcggcgaccggcgcaagggtgcgtaacacgtgagtaacatgcccgatacaggaggataatccatggaaacgtggtctaatactccatattataatatgtacgcatgtacctattatgaaattttcgaaggtatcggattggctcgcgcaacattagccagttggtagggtaacggcctaccaaagcgacgatgtttaggggtcctgagagggaggtcccccacactggaactgagacacggtcccgactcctacgggagccagcagccgcggtaat

SEQ ID NO: 8589 - DNA, 490 bp, unidentified
  misc_feature 1..490: note = Ascusbbf_1590764, encodes 16S rRNA
  source 1..490: mol_type = genomic DNA
agagtttgatcatggctcaggatgaacgctagctacaggcttaacacatgcaagtcgaggggcagcatggtcttcgggccgatggcgaccggcaaacgggtgcggaacgcgtacacaaccaaccgtatactgggggatagccctgagaaattaggaataataccccataagacagtaatccggcatcgggtagctgttaaagattcattggtatatgacgggtgtgcgtaagattagatagttggcggggtaaaggcccaccaagtctacgatctttagctgatgtgagagcatgatcagccacatgggcactgagacacgggcccaactcctacgggaggcagcagtgaggaatattggtcaatggacggaagtctgaaccagccatgccgcgtgaaggatgaatgcgttctgcgttgtaaacttcttttatctgaggcgaaaacaggtttttttaaacctcttgacggtatcagatgaataagcaccg

SEQ ID NO: 8590 - DNA, 490 bp, unidentified
  misc_feature 1..490: note = Ascusbbf_1370422, encodes 16S rRNA
  source 1..490: mol_type = genomic DNA
agagtttgatcctggctcaggacgaacgctggcggcgtgcttaacacatgcaagtcgaacggactgcttcaagcttgcttggggtggtgagtggcgaacgggtgagtaacacgtgagtaacctgccctcttctttgggataacggccggaaacggctgctaataccgggtattcactggtcctcgcatgggggttggtggaaaggggcctcgtttggggtttctggtgggggatgggctcgcggcttatcagcttgttggtggggtgatggcctaccaaggctttgacgggtagccggcctgagagggtgaccggtcacattgggactgagatacggcccagactcctacgggaggcagcagtggggaattttgcacaatgggcgcaagcctgatgcagcgacgccgcgtgagggatggaggccttcgggttgtgaacctctttcgctcatggtcaagccgcggatgtgtccgtggtgagggtagtgggt

SEQ ID NO: 8591 - DNA, 490 bp, unidentified
  misc_feature 1..490: note = Ascusbbf_1602692, encodes 16S rRNA
  source 1..490: mol_type = genomic DNA
agagtttgatcctggctcagaacgaacgctggcggcgcgtcttaagcatgcaagtcgaacggcaaggaagtgcttgcacttccctagagtggcggactggtgagtaacacgtgggtgacataccttttagttggggatagctattagaaatagtagataataccgaatgtgaccattacagttagagtgtaatgaggaaaggagctaaggctccgctaaaagattggcccgcggcccattagctagttggtgaggtaacggcccaccaaggcgatgatgggtatccggcctgagagggtgatcggacacattgggactgagatacggcccagactcctacgggaggcagcagctaagaatattccacaatggacgaaagtctgatggagcgacgccgcgtggatgacgaaggccgaaaggttgtaaaatccttttaaactggaacaataatcatggtagggaatgaccgtgaggtgaccgtacagtttga

SEQ ID NO: 8592 - DNA, 470 bp, unidentified
  misc_feature 1..470: note = Ascusbbf_1509114, encodes 16S rRNA
  source 1..470: mol_type = genomic DNA
agagtttgatcctggctcagaacgaacgctggcggcaggcctaatacatgcaagtcgaacgaaaccttcgggtttagtggcgcacgggtgagtaatgcatgggaacgtgcccttcagtacggaataacatcgggaaactggtgctaataccgtataatatctccggatcaaagatttatcgctgaaggatcggcccatgttagattagcttgttggtgaggtaatggctcaccaaggcgacgatctatagctggtttgagaggatgaccagccacactgggactgagacacggcccagactcctacgggaggcagcagtaaggaatattggacaatgggggaaaccctgatccagccatgccgcgtgaatgaagaaggccttagggttgtaaagttcttttagggatgacgataatgacggtagtcccagaaaaagctccggctaactccgtgccagcagccgcggtaat

SEQ ID NO: 8593 - DNA, 490 bp, unidentified
  misc_feature 1..490: note = Ascusbbf_615578, encodes 16S rRNA
  source 1..490: mol_type = genomic DNA
agagtttgatcatggctcaggatgaacgctagcggcaggcctaacacatgcaagtcgaggggtagagttagcttgctaacttgagaccggcgcacgggtgcgtaacgcgtatgcaatctaccttgtacagggggatagcccagagaaatttggattaataccccatagtgttatagactggcatcggtttataactaaagttccaacggtacaagatgagcatgcgtcccattagttagttggtgtggtaacggcacaccaagacgatgatgggtaggggtcctgagagggagatcccccacactggtactgagacacggaccagactcctacgggaggcagcagtgaggaatattggtcaatggacgcaagtctgaaccagccatgccgcgtgcaggaagaaggttctatggattgtaaactgcttttatataggaagaaacactctctcgtgagggagcttgactgtactataggaataaggatcggc

SEQ ID NO: 8594 - DNA, 490 bp, unidentified
  misc_feature 1..490: note = Ascusbbf_1732391, encodes 16S rRNA
  source 1..490: mol_type = genomic DNA
agagtttgatcctggctcaggacgaacgctggcggcgtgcttaacacatgcaagtcgaacgagaagcaccggaaggagttttcggacaacggaaggtgtggaaagtggcggacgggtgagtaacgcgtgaggaacctgccttggagagggggacaacagctggaaacggctgctaataccgcatgatgcacggaggggacatcccttttgtgccaaagatttatcgctctgagatggcctcgcgtctgattagctggttggtggggtaacggctcaccaaggcgacgatcagtagccggactgagaggttgaacggccacattgggactgagatacggcccagactcctacgggaggcagcagtggggaatattgggcaatgggcgcaagcctgacccagcaacgccgcgtgaaggaagaaggctttcgggttgtaaactgcttttgtacggggataaagtcagggacgtgtccctgtttgcatgtaccg

SEQ ID NO: 8595 - DNA, 490 bp, unidentified
  misc_feature 1..490: note = Ascusbbf_1591720, encodes 16S rRNA
  source 1..490: mol_type = genomic DNA
agagtttgatcctggctcaggacgaacgctggcggcgtgcctaacacatgcaagtcgagcgaagcttttttagatgaaattttcggatggaatctaaaattgtcttagcggcgaacgggtgagtaacgcgtgagaaacctgcctttcacaacgggatagcctctggaaacggggattaataccgtatgacattattttttcgcatgaagagataattaaagcgtaaagcggtgaaagatggtctcgcgtcctattagttagttggtgaggtaacggctcaccaagacagcgataggtagccggcctgagagggtgaacggccacactggaactgagacacggtccagactcctacgggaggcagcagtggggaatattgcacaatggaggaaactctgatgcagcgacgccgcgtgaatgatgaaggccttcgggtcgtaaaattctgtccttggggaagataatgacggtacccaaggaggaagccccg

SEQ ID NO: 8596 - DNA, 490 bp, unidentified
  misc_feature 1..490: note = Ascusbbf_1815575, encodes 16S rRNA
  source 1..490: mol_type = genomic DNA
agagtttgatcctggctcaggacgaacgctggcggcgtgcttaacacatgcaagtcgaacgagggaattagaagcttgcttttatgacccgagtggcaaacgggtgagtaacgcgtagacaacctgcctctcagatggggacaacatcccgaaaggggtgctaataccgaatgttgtgcaacctctgcatggaggatgcattaaaggtggtttcggccaccgctgagagatgggtctgcgtctgattagctagttggtggggtaacggcctaccaaggcgacgatcagtagccggtctgagaggatgaacggccacattggaactgagacacggtccagactcctacgggaggcagcagtggggaatcttccgcaatgggcgaaagcctgacggagcaacgccgcgtgagtgaagaaggtcttcggatcgtaaagctctgttgaaggggacgaagggcaggatcaggaaatgggttctgtttgacggtac

SEQ ID NO: 8597 - DNA, 468 bp, unidentified
  misc_feature 1..468: note = Ascusbbf_1519016, encodes 16S rRNA
  source 1..468: mol_type = genomic DNA
agagtttgatcctggctcagaacgaacgctggcggcaggcctaatacatgcaagtcaaacggctcttcggagcagtggcgcacgggtgagtaacacgtgggaatctacaccaaggtacggaataacttcgggaaaccggcgctaataccgtataatatctccggatcaaagatttatcgccttgggatgagcccgcgcttgattagatagttggtggggtaatggcctaccaagtcgacgatcaatagctggtctgagaggatgatcagccacactggtactgagacacggaccagactcctacgggaggcagcagtaagggatattggacaatggaggaaactctgatccagccatgccgcgtgagtgaagaaggccttcgggttgtaaaactctttcagtagtgaagatgatgacggtaactacagaagaagctccggctaacttcgtgccagcagccgcggtaat

SEQ ID NO: 8598 - DNA, 479 bp, unidentified
  misc_feature 1..479: note = Ascusbbf_1731859, encodes 16S rRNA
  source 1..479: mol_type = genomic DNA
agagtttgatcctggctcagaacgaacgctggcggcaggcctaacacatgcaagtcgaaggagaagcccctttcggggggtggacactggcgcacgggtgagtaacgcgtgggaatctaccccggggtggggaataaccgctggaaacggcggctaataccgcgtacgccgtattgggaaagctttagcgccctgggatgagcccgcgttagattagctagttggtggggtaacggcctaccaaggcgacgatctatagctggtctgagaggatgatcagccacactgggactgagacacggcccagactcctacgggaggcagcagtggggaatattggacaatgggcgcaagcctgatccagccatgccgcgtgcgtgaagaaggccttagggttgtaaagcgctttcactggtgaagatgatgacggtagccagagaagaagccccggctaaccacgtgccagcagccgcggtaat

SEQ ID NO: 8599 - DNA, 490 bp, unidentified
  misc_feature 1..490: note = Ascusbbf_1008590, encodes 16S rRNA
  source 1..490: mol_type = genomic DNA
agagtttgatcatggctcaggatgaacgctggcggcgtgcctaacacatgcaagtcgagcggagtttattaaggaagtcgtaggacggaaagaataaacttagcggcggacgggtgagtaacacgtgagcaacctgcctttagctggggaataacactgggaaaccagtgctaataccgcataacatccaagtgtggcatcacatttggatcaaaggagaaatccggcaaaagatgggctcgcgtccgattagatagttggtagggtaaaggcctaccaagtcaacgatcggtagccggactgagaggttgaccggccacattgggactgagacacggcccagactcctacgggaggcagcagtggggaatattgggcaatgggggaaaccctgacccagcaacgccgcgtgaaggaagaaggtcttcggattgtaaacttctttgatcagggacgaagaaatgactgtacctgaagaacaagtcacggt

SEQ ID NO: 8600 - DNA, 490 bp, unidentified
  misc_feature 1..490: note = Ascusbbf_1398695, encodes 16S rRNA
  source 1..490: mol_type = genomic DNA
agagtttgatcatggctcaggacgaacgctggcggcgtgcctaacacatgcaagtcgaacgggaacagtttggtttcgattgaactgttctagtggcgaacgggtgagtaacgcgtgagcaacctgcctttcagagggggacaacagctggaaacggctgctaataccgcataatctatctaatgggcatccattggatatcaaagatttatcgctgaaagatgggctcgcgtctgattagctagttggtggggtaaaagcctaccaaggcgacgatcagtagccggactgagaggttgaacggccacattgggactgagatacggcccagactcctacgggaggcagcagtggggaatattgggcaatgggggaaaccctgacccagcaacgccgcgtgaaggaagaaggctttcgggttgtaaacttctttgaccagggacgataatgacggtacctggaaaacaagccacggctaactacgtgccag

SEQ ID NO: 8601 - DNA, 490 bp, unidentified
  misc_feature 1..490: note = Ascusbbf_1581119, encodes 16S rRNA
  source 1..490: mol_type = genomic DNA
agagtttgatcatggctcaggatgaacgctggcggcgtgcttaacacatgcaagtcgaacggggaattttatctcggtagaattcctagtggcgaacgggtgagtaacgcgtaggcaacctgcccttcagacggggacaacatcccgaaaggggtactaataccggatacgaagctcctgccgcatgacgggagcttgaaaggcgcaaacaagcgccgctgagggatgggcctgcgtccgattagcttgttggtggggtaacggcccaccaaggcgacgatcggtagccggtctgagaggatgatcagccacactgggactgagacacggcccagactcctacgggaggcagcagtggggaatattggacaatgggcgaaagcctgatccagccatgccgcgtgagtgatgaaggccctagggttgtaaagctctttcaacggtgaagataatgacggtaaccgtagaagaagccccggctaacttcgtg

SEQ ID NO: 8602 - DNA, 490 bp, unidentified
  misc_feature 1..490: note = Ascusbbf_1486258, encodes 16S rRNA
  source 1..490: mol_type = genomic DNA
agagtttgatcatggctcaggatgaacgctagcgggaggcctaacacatgcaagccgagcggtagattactttcgggtaattgagagcggcgtacgggtgcggaacacgtgtgcaacctgcctttatcagggggatagcctttcgaaaggaagattaataccccataatataatgagtggcatcacttattattgaaaactgaggtggataaagatgggcacgcgcaagattagatagttggtagggtaacggcctaccaagtcgatgatctttagggggcctgagagggtgatcccccacactggtactgagacacggaccagactcctacgggaggcagcagtgaggaatattggacaatgggtgagagcctgatccagccatcccgcgtgaaggacgacggccctatgggttgtaaacttcttttgtatagggataaacctttccacgtgtggaaagctgaaggtactatacgaataagcaccggct

SEQ ID NO: 8603 - DNA, 490 bp, unidentified
  misc_feature 1..490: note = Ascusbbf_841799, encodes 16S rRNA
  source 1..490: mol_type = genomic DNA
agagtttgatcatggctcaggacgaacgctggcggcgtgcttaacacatgcaagtcgaacgatgaagcctagcttgctgggtggattagtggcgaacgggtgagtaacacgtgagtaacctgcccccttcttcgggataagccttggaaacgaggtctaataccggatattcactgcctgtcgcatgatgggtggtggaaagattttttggtgggggatgggctcgcggcctatcagctagttggtggggtgatggcctaccaaggcgtcgacgggtagccggcctgagagggcgaccggccacactgggactgagacacggcgcagactcctacgggaggcagcagtggggaatattgcacaatgggcgaaagcctgatgcagcgacgccgcgtgagggatgaaggccttcgggttgtaaacctctttcgacacggaagaagctttcgggtgacggtacgtgtagaagaagcgccggctaactacgtgc

SEQ ID NO: 8604 - DNA, 490 bp, unidentified
  misc_feature 1..490: note = Ascusbbf_1567613, encodes 16S rRNA
  source 1..490: mol_type = genomic DNA
agagtttgatcctggctcaggatgaacgctagctacaggcttaacacatgcaagtcgagcggtaaggcaccttcgggtgtacacgagcggcgaacgggtgagtaacacgtgaacaatctgcccttttctttggaataagcgttggaaacgacgtctaatgccgaatatgactctgggaggcatctcctggggtggaaagctccggcggaagaggatgagttcgcggcctatcagcttgttggtggggtaatggcccaccaaggcgacgacgggtagccggcctgagagggtgaccggccacactgggactgagacacggcccagactcctacgggaggcagcagtggggaatattggacaatgggcgaaagcctgatccagcaacgccgcgtgagggatgacggccttcgggttgtaaacctctttcagcaccgacgaagcgagagtgacggtaggtgcagaagaaggaccggccaactacgtgccagca

SEQ ID NO: 8605 - DNA, 490 bp, unidentified
  misc_feature 1..490: note = Ascusbbf_1545591, encodes 16S rRNA
  source 1..490: mol_type = genomic DNA
agagtttgatcctggctcaggatgaacgctggcggcgtgcctaacacatgcaagtcgaacggggtacagacgccgttgaagcttcggccgaaacatgtctgtacttggtggcgaacgggtgagtaacgcgtgggcaacctgccccgtaccgggggatagcagcgggaaactgctgataataccgcataagcgcacagcacggcatcgtgtagtgtgaaaaactccggtggtacgggatgggcccgcgtctgattagctagttggcggggtaacggcccaccaaggcgacgatcagtagccgggctgagagaccggacggccacattgggactgagacacggcccagactcctacgggaggcagcagtgggggatattgcacaatgggggaaaccctgatgcagcgacgccgcgtgagtgaatgaagtatttcggtgtgtaaagctctatcagcagggaagaaagcccgcttcggcggggatgacggtacc

SEQ ID NO: 8606 - DNA, 490 bp, unidentified
  misc_feature 1..490: note = Ascusbbf_94, encodes 16S rRNA
  source 1..490: mol_type = genomic DNA
agagtttgatcctggctcaggataaacgctggcggcgcacataagacatgcaagtcgaacggacttaactcattcttaacgattgagagcggttagtggcggactggtgagtaatgtataagtaacctgcctatcagaggggaacaacagttggaaacgactgctaataccgcatatgccacgagaatcacatggttcaagtgggaaaggagcaatccgctgatagatggacttatatctgattagctagttggtggggtaacggcctaccaaggcgacgatcagtagccggactgagaggttaaacggccacattgggactgagatacggcccagactcctacgggaggcagcagtcgggaatattgcgcaatggaggaaactctgacgcagtgacgccgcgtgcaggaagaaggttttcggattgtaaactgctttagacagggaagaaaaaagacagtacctgtagaataagctccggctaactacg

SEQ ID NO: 8607 - DNA, 490 bp, unidentified
  misc_feature 1..490: note = Ascusbbf_1354, encodes 16S rRNA
  source 1..490: mol_type = genomic DNA
agagtttgatcctggctcaggatgaacgctggcggcgtgcctaatacatgcaagtcgaacgaggtttctcttcggggaaaccgagtggcgaacgggtgagtaacacataggtaatctacctttcagaatgggatacccaagagaaattttggctaataccgtatacaatcatttctccgcatggagatttgatgaaaggggctccaaagcctcgctgttagatgaacctgtggcacattagctagttggtgagataacagcccaccaaggcgaagatgtgtagccgatctgagaggataatcggccacaatgggactgagacacggcccatactcctacgggaggcagcagtagggagttttcggcaatgggggaaaccctgaccgagcaacgccgcgtgatttagaaggccctctgggtcgtaagaatctgttgtaaaggagaaatggtagtgggaggaaatgcccattatttgatagtactttattag

SEQ ID NO: 8608 - DNA, 490 bp, unidentified
  misc_feature 1..490: note = Ascusbbf_1476, encodes 16S rRNA
  source 1..490: mol_type = genomic DNA
agagtttgatcctggctcaggatgaacgctggcggcgtgcttaacacatgcaagtcgaacgaagcatttttcgattcttcggaaaaggaaaatgactgagtggcggacgggtgagtaacgcgtgggaaacctgccttataccgggggatagcagttggaaacgactggtaaaaccgcataagcgcacgggtacgcatgtatctgtgtgaaaaactctggtggtataagatggtcccgcgtctgattaggcagttggcggggcagcggcccaccaaaccgacgatcagtagccgacctgagagggtgaccggccacattgggactgagacacggcccagactcctacgggaggcagcagtggggaatattgcacaatggaggaaactctgatgcagcgacgccgcgtgagtgaagaagtatttcggtatgtaaagctctttcggcagggaagataatgacggtacctgcagaagaagcaccggctaaatac

SEQ ID NO: 8609 - DNA, 490 bp, unidentified
  misc_feature 1..490: note = Ascusbbf_4725, encodes 16S rRNA
  source 1..490: mol_type = genomic DNA
agagtttgatcctggctcaggatgaacgctagcggcaggcttaacacatgcaagtcgaggggcagcgcgggagtagcaatacttctggcggcgaccggcggaagggtgagtaacgcgtgagcaacatgcccgtaacagggggataaccgttggaaacgacgactaatatcccgtaatatatcgagaggcatctcttgatattgaaagcttcggtggttacggattggctcgcgtctgattaggcagttggcggggtaacggcccaccaaaccgacgatcagtaggggttctgagaggaaggtcccccacattggaactgagacacggtccagactcctacgggaggcagcagtgaggaatattggacaatggccggaaggctgatccagccatgccgcgtgaaggacgaaggccctatgggtcgtaaacatcttttgttgtggagcaataaggggttcgtgcagccccgatgagagtacacagcgaataa

SEQ ID NO: 8610 - DNA, 490 bp, unidentified
  misc_feature 1..490: note = Ascusbbf_594219, encodes 16S rRNA
  source 1..490: mol_type = genomic DNA
agagtttgatcatggctcaggacgaacgctggcggcgtgcttcatacatgcaagtcgaacgataaggttccttcgggaatacataagtggcggacgggtgagtaatatgtagagaatctaccttcaagagggggacaacagagggaaactcctgctaataccccatatgcgcgtagctgagatgctattcgtgaaaactccggtgcttgaagatgagtctgcatctgattagctagttgggggtgtaacggaccaccaaggcgacgatcagtagctggtttgagaggatgatcagccacaatgggactgagacacggcccatactcctacgggaggcagcagtagggaattttgcgcaatgggcgaaagcctgacgcagcaacgccgcgtgatcgcagacgcccttcggggtgtaaagatctgtcagtagggacgaaaaatgactgtacctacagaggaagcaccggctaactccgtgccagcagcgcgg

SEQ ID NO: 8611 - DNA, 490 bp, unidentified
  misc_feature 1..490: note = Ascusbbf_2115, encodes 16S rRNA
  source 1..490: mol_type = genomic DNA
agagtttgatcatggctcaggatgaacgctagcggcaggcttaacacatgcaagtcgaggggtaacaggcggtagcaatactgtgctgacgaccggcgcacgggtgcgtaacgcgtatgcaacctaccttgtacagggggataacggagtgaaaattccactaatatcccatagtgttggggaatcgcatggttcttcaactaaagcttcggtggtacaagatgggcatgcgtgacattaggtagttggcggggcaacggcccaccaagccgacgatgtctaggggagctgagaggcttatcccccacactggtactgagacacggaccagactcctacgggaggcagcagtgaggaatattggtcaatggacggaagtctgaaccagccatgccgcgtggaggaagaaggtcctatgggttgtaaactccttttgtccgagagtaataaggggcatgcgtgcctcgatgagagtatcgggcgaataagc

SEQ ID NO: 8612 - DNA, 490 bp, unidentified
  misc_feature 1..490: note = Ascusbbf_13382, encodes 16S rRNA
  source 1..490: mol_type = genomic DNA
agagtttgatcctggctcaggacgaacgctggcggcgtgcctaatacatgcaagttgaacgcttgattttcaccgaagcttgcttcaccgaaaatcaagagtagcgaacgggtgagtaacgcgtgggtaacctacctatcagcgggggataactattggaaacgatagctaataccgcataacaattgagattgcataatcttaatttgaaagtaccaattggtacactgagagatggacccgcgttgtattagctagttggtagtgtaatggactaccaaggcgatgatacatagccgacctgagagggtgatcggccacattgggactgagacacggcccaaactcctacgggaggcagcagtagggaatcttcggcaatggacgaaagtctgaccgagcaacgccgcgtgagtgaagaaggttttcggatcgtaaaactctgttgttagagaagaacgttgcatagagtggaaagttatgcaagtga

SEQ ID NO: 8613 - DNA, 490 bp, unidentified
  misc_feature 1..490: note = Ascusbbf_10432, encodes 16S rRNA
  source 1..490: mol_type = genomic DNA
agagtttgatcatggctcaggatgaacgctagctacaggcttaacacatgcaagtcgaggggcagcatgggcttagcttgctaagcccgatggcgaccggcgcacgggtgagtaacacgtatccaaccttccggtaactccggtatagcctttcgaaagaaagattaatcccggatagtatggtgattccgcatggtttctccattaaaggattccggttaccgatggggatgcgttccattaggcagttggcggggtaacggcccaccaaacctacgatggataggggttctgagaggaaggtcccccacattggaactgagacacggtccaaactcctacgggaggcagcagtgaggaatattggtcaatgggcggaagcctgaaccagccaagtagcgtgaaggatgactgccctatgggttgtaaacttcttttataagggaataattgtgggtacgcgtacccatttgcatgtaccttatgaata

SEQ ID NO: 8614 - DNA, 490 bp, unidentified
  misc_feature 1..490: note = Ascusbbf_7663, encodes 16S rRNA
  source 1..490: mol_type = genomic DNA
agagtttgatcatggctcaggatgaacgctagcggcaggcttaacacatgcaagtcgaggggtaacgcggtgtagcaatacaccggcgacgaccggcgcacgggtgcgtaacgcgtatgcaacctgcctcgcacagggggataacggagtgaaaattccactaatatcccatggtgttggagatccgcatggttttccaactaaagcttcggtggtgcgagatgggcatgcgtgacattaggtagttggcggggcaacggcccaccaagccgacgatgtctaggggagctgagaggcttatcccccacactggtactgagacacggaccagactcctacgggaggcagcagtgaggaatattggtcaatggacggaagtctgaaccagccatgccgcgtggaggaagaaggtcctatgggttgtaaactccttttgtccgagagtaataaggggcatgcgtgccccgatgagagtatcgggcgaataagc

SEQ ID NO: 8615 - DNA, 470 bp, unidentified
  misc_feature 1..470: note = Ascusbbf_7474, encodes 16S rRNA
  source 1..470: mol_type = genomic DNA
agagtttgatcatggctcagaacgaacgctggcggcaggcttaacacatgcaagtcgaacgatctcttcggagatagtggcagacgggtgagtaacacgtgggaatctacctagttcttcgggataactgagggaaacttcagctaataccggatacgcccttttggggaaagatttatcggaattagatgagcccgcgttggattagctagttggtgaggtaatggctcaccaaggcgacgatccatagctggtctgagaggatgatcagccacactgggactgagacacggcccagactcctacgggaggcagcagtggggaatattggacaatgggcgcaagcctgatccagccatgccgcgtgagtgatgaaggccttagggttgtaaagctctttcaccggtgaagataatgacggtaaccggagaagaagccccggctaacttcgtgccagcagccgcggtaat

SEQ ID NO: 8616 - DNA, 490 bp, unidentified
  misc_feature 1..490: note = Ascusbbf_98164, encodes 16S rRNA
  source 1..490: mol_type = genomic DNA
agagtttgatcctggctcaggatgaacgctggcggcgtgcctaatacatgcaagtcggacggtatcagcgatgatatagtggcgaacgggtgagtaacacgttggtgacctgccccaaagatgggaatatcacctggaaacgggtggcaaaaccgaataagcttataggagttagagagctataagtaaaagagtgatctactttgggaggggcctgcggcccatcagttagttggtgagggtaacggcccaccaagacagcgacgggtaggggacctgagagggtggtcccccacaatggaactgaaacacggtccatacacctgcgggtggcagcagtagggaatattgctaaatgggcgaaagcctgaagcagcaacgccgcgtggacgaaggaggccttcgggtcgtaaagtccttttataggggaaaaggaaggatggtaccctatgaataagtctcggctaactacgtgccagcagccgcggta

SEQ ID NO: 8617 - DNA, 490 bp, unidentified
  misc_feature 1..490: note = Ascusbbf_63167, encodes 16S rRNA
  source 1..490: mol_type = genomic DNA
agagtttgatcctggctcaggacgaacgctggcggcgtgcttaacacatgcaagtcgaacggtaaggcccttcggggtacacgagtggcgaacgggtgagtaacacgtgagtgacctgccctctacttcgggataacttccagaaatggtggctaataccggatattcacatgttcctgcatgggggtgtgtggaaagccttgtgcggtaggggatggactcgcggcctatcagcttgttggtgaggtagtggctcaccaaggcgtcgacgggtagccggcctgagagggtgaccggccacattgggactgagatacggcccagactcctacgggaggcagcagtggggaatattgcgcaatgggcggaagcctgacgcagcaacgccgcgtgcgggatgacggccttcgggttgtaaaccgctttcacgcatgacgaagcttttgtgacggtagtgcgagaagaagcaccggccaactacgtgccagca

SEQ ID NO: 8618 - DNA, 490 bp, unidentified
  misc_feature 1..490: note = Ascusbbf_56231, encodes 16S rRNA
  source 1..490: mol_type = genomic DNA
agagtttgatcatggctcaggacgaacgctggcggcgtgcttaacacatgcaagtcgaacggggttttatttaagcttgcttttatggaacctagtggcaaacggatgagtaacgcgtagacaacctgcctttgagatggggacaacagatcgaaagatttgctaataccgaatgaagcagcattttcgcatgaaggagctgttaaaggtggcctctatttataagctaccacttaaagatgggtctgcgtctgattagctagttggtgaggtaacggctcaccaaggcgacgatcagtagccggtctgagaggatgaacggccatattgggactgagacacggcccaaactcctacgggaggcagcagtggggaatcttccgcaatgggcgaaagcctgacggagcaacgccgcgtgagtgaagaaggtcttcggatcgtaaagctctgttgttggggacgaatgttacctttgagaacattggaggta

SEQ ID NO: 8619 - DNA, 490 bp, unidentified
  misc_feature 1..490: note = Ascusbbf_8021, encodes 16S rRNA
  source 1..490: mol_type = genomic DNA
agagtttgatcatggctcagaacgaacgctggcggcgcgttttaagcatgcaagtcgcagggtaaaattttagcaatagaattgagactggcgaacgggtgagtaacacgtgaaaatctaccttgagatgggggatagccggtagaaatatcgggtaataccgcatatgccgagaggtgaaaggggcaactgctccgtcttgagatgagtttgcgtctgattagatagttggcgaggtaaaggctcaccaagtctacgatcagtagccggcctgagagggtgatcggccacattgggactgagacacggcccagactcctacgggaggcagcagctaagaatattccgcaatgggagaaatcctgacggagcgacgccgcgtgaacgattgaaggcagaaatgttgtaaagttcttttattagggaagaataaggctggtagtggaaagatcagtcgatgacggtacctaatgaataagccacggctaac

SEQ ID NO: 8620 - DNA, 490 bp, unidentified
  misc_feature 1..490: note = Ascusbbf_8019, encodes 16S rRNA
  source 1..490: mol_type = genomic DNA
agagtttgatcatggctcaggatgaacgctagctacaggcttaacacatgcaagtcgaggggcagcatgaatcaagcttgcttgatttgatggcgaccggcgcacgggtgcgtaacgcgtatccaatctaccctattctcagggatagccttgcgaaagtaagattaatacctgatggtcttggcgggtggcatcacctgccaagtaaagatttatcggaatgggatggggatgcgtccgattagcttgacggcggggtaacggcccaccgtggcgacgatcggtaggggttctgagaggaaggtcccccacactggaactgagacacggtccagactcctacgggaggcagcagtgaggaatattggtcaatggccgtaaggctgaaccagccaagtagcgtgagggatgacggccctacgggttgtaaacctcttttgttggggaataaagtcaggtacgtgtacctgtttgtatgtaccttacgaat

SEQ ID NO: 8621 - DNA, 490 bp, unidentified
  misc_feature 1..490: note = Ascusbbf_1324140, encodes 16S rRNA
  source 1..490: mol_type = genomic DNA
agagtttgatcctggctcaggacgaacactggcggtatgcttaacacatgcaagtcgaacgcgaagcttcttaatgatccttcgggagatttaagaagtggatagtggcgaacgggtgagtaacgcgtgggcaacctgcctttcggagcggaatagcctcgggaaaccgggagtaaagccgcataacattattttttcgcatgaagaaataatcaaaactccggtgccgaaggatggtcccgcgtcctattagctggttggtgaggcaacggctcaccaaggcgacgatcggtagccggtcgacgaaggcgaacggccaaactggaactgagacacggtccagactcctacgggaggcagcagtggggaatattgcgcaatgggggcaaccctgacgcagcaataccgcgtgagtgaagaaggttttcggatcgtaaagctctgttattggggaagaagaagtgacggtacccaatgaggaagtcccggc

SEQ ID NO: 8622 - DNA, 471 bp, unidentified
  misc_feature 1..471: note = Ascusbbf_7829, encodes 16S rRNA
  source 1..471: mol_type = genomic DNA
agagtttgatcatggctcagaacgaacgctggcggcaggcctaaaacatgcaagttgaacggctgtagcaatacagcagtagcgcacgggtgagtaatatatgggaacatgtcttttggtggggaatattctctggaaacggagagcaataccgcataagccctacgggggaaagatttatcgccgattgagtggcccatattggattagctagttggttgggtaacggctgaccaaggcgacgatccatagctgatctgagaggatgatcagccacactgggactgagacacggcccagactcctacgggaggcagcagttaggaatattggacaatgggggcaaccctgatccagccatgccgcgtgagtgttaaggccttcgggttgtaaagctcttttgtatgggaaaatgatgatggtaccataagaataagcaccggctaacttcgtgccagcagccgcggtaat

SEQ ID NO: 8623 - DNA, 470 bp, unidentified
  misc_feature 1..470: note = Ascusbbf_28974, encodes 16S rRNA
  source 1..470: mol_type = genomic DNA
agagtttgatcctggctcagaacgaacgctggcggcaggcttaacacatgcaagtcgagcgggcccttcggggtcagcggcagacgggtgagtaacgcgtgggaatctacccatccctacggaacaactccgggaaactggagctaataccgtatacgccctttgggggaaagatttatcggggatggatgagcccgcgttggattagctagttggtggggtaaaggcctaccaaggcgacgatccatagctggtctgagaggatgatcagccacattgggactgagacacggcccaaactcctacgggaggcagcagtggggaatattggacaatgggcgcaagcctgatccagccatgccgcgtgaatgatgaaggccttagggttgtaaagttctttcaccggagaagataatgacggtatccggagaagaagccccggctaacttcgtgccagcagccgcggtaat

SEQ ID NO: 8624 - DNA, 489 bp, unidentified
  misc_feature 1..489: note = Ascusbbf_27824, encodes 16S rRNA
  source 1..489: mol_type = genomic DNA
agagtttgatcatggctcagaacgaacgctggcggcatggattaggcatgcaagtcgaacgaagcagcaatgcttagtggcggaagggtgaggaacgcgtgagtaatctgcccccaagttgggaataacagttggaaacgactgctaataccgaatgtggctgcgaggtcgcatgattttgcagttaaagatttattgcttggggatgagctcgcgtcccattagttagttggcggggcaacggcccaccaagacgatgatgggtagctggtctgagaggatggtcagccacactgggactgagacactgcccagactcctacgggaggctgcagtcgagaatcttgggcaatgcgcgaaagcgtgacccagcaatgccgcgtgcgtgatgaaggtcttcggattgtaaagcgctgtcaaccgggacgaaattctgacggtaccggtgaaggaagccacggctaactacgtgccagcagccgcggtaat

SEQ ID NO: 8625 - DNA, 490 bp, unidentified
  misc_feature 1..490: note = Ascusbbf_127786, encodes 16S rRNA
  source 1..490: mol_type = genomic DNA
agagtttgatcctggctcaggacgaacgctggcggcgtgcttaacacatgcaagtcgaacggggcgattgaaagcttgcttttgagagcctagtggcaaacgggtgagtaacgcgtaggcaacctgcctttgggatggggacaacaggacgaaagccctgctaataccgaatgaagtattcttcctgcatgggaaggatatgaaagatggcctctgaaaatgctatcgcctgaagatgggcctgcgtctgattagctggttggtgaggtaacggctcaccaaggcgacgatcagtagccggtctgagaggatgaacggccacattgggactgagacacggcccagactcctacgggaggcagcagtggggaatcttccgcaatgggcgcaagcctgacggagcaacgccgcgtgagtgaagaaggtcttcggatcgtaaagctctgttgttggggacgaatggcgctgaggcgaacagtcttggtgaatg

SEQ ID NO: 8626 - DNA, 468 bp, unidentified
  misc_feature 1..468: note = Ascusbbf_39962, encodes 16S rRNA
  source 1..468: mol_type = genomic DNA
agagtttgatcctggctcagaacgaacgctggcggcaggcttaacacatgcaagtcgagcgcctcgcaagaggagcggcagacgggtgagtaacgcgtgggaatctaccgagccctaaggaataactccgggaaactggaactaataccttatacgccctacgggggaaagatttatcggggtttgatgagcccgcgttggattagctagttggtggggtaaaggcctaccaaggcgacgatccatagctggtctgagaggatgatcagccacattgggactgagacacggcccaaactcctacgggaggcagcagtggggaatattggacaatgggcgcaagcctgatccagccatgccgcgtgagtgatgaaggtcttaggattgtaaagctctttcaccgatgaagataatgactgtagtcggagaagaagccccggctaacttcgtgccagcagccgcggtaat

SEQ ID NO: 8627 - DNA, 490 bp, unidentified
  misc_feature 1..490: note = Ascusbbf_74993, encodes 16S rRNA
  source 1..490: mol_type = genomic DNA
agagtttgatcatggctcaggacgaacgctggcggcgtgcttcacacatgcaagtcgaacggaaaggccctttcgggggtactcgagtggcgaacgggtgagtaacacgtgagtaatctgcctttggctttgggataagcctcggaaacggggtctaataccggatatgacacttcaccgcatggtgtgggtgtggaaagtttttcggctgaagatgggctcgcggtctatcagcttgttggtggggtaatggctcaccaaggctttgacgggtagccggcctgagagggcgaccggccacactgggactgagacacggcccagactcctacgggaggcagcagtggggaatattgcgcaatgggcggaagcctgacgcagcgacgccgcgtgagggatgacggccttcgggttgtaaacctctttcggtaccgacgaagcgttaagtgacggtaggtgcagaagaagcgccggctaactacgtgccagc

SEQ ID NO: 8628 - DNA, 490 bp, unidentified
  misc_feature 1..490: note = Ascusbbf_38141, encodes 16S rRNA
  source 1..490: mol_type = genomic DNA
agagtttgatcatggctcaggatgaacgctagcggcaggcctaatacatgcaagtcgaacggtaaatgccccttcgggggtatgagagtggcgcacgggtgcgtaacgcgtatgcaacccacccgctgtcgggggatagcccggagaaattcggattaataccccatgaggagttctggaggcatctccgggatttcaaaactacggtgacggcggacgggcatgcgtgccattagatagttggcggggtaacggcccaccaagtcgacgatggctaggggatctgagaggacggtcccccacactggtactgagacacggaccagactcctacgggaggcagcagtaagggatattggtcaatggggggaaccctgaaccagccatgccgcgtgagggaataaggccctatgggtcgtaaacctcttttgccgggggataaagacagctacgtgtagttgtttgaaggtacccggagaataagcatcgg

SEQ ID NO: 8629 - DNA, 490 bp, unidentified
  misc_feature 1..490: note = Ascusbbf_117131, encodes 16S rRNA
  source 1..490: mol_type = genomic DNA
agagtttgatcatggctcagaacgaacgctggcggcgtggttgatacatgcaagtcgaacgggaatgagggcttcggccctttagtacagtggcggacgggtgagtaacacgtaatcaacctgccctcaagatggggatagccttccgaaagggagggtaatacctgataagcccacagtgcggcatcgcacagtggtaaaaggtggggaccttcgggcctgccgcttgaggatgggattgcgtcctattagcttgttggcggggtaacggcccaccaaggcgatgatgggtaaccggcctgagagggtgaacggtcacattggaactgagacacggtccagactcctacgggaggcagcagtgctgaatcattcgctaatgcgcgaaagcgtgacggtgcgacgccgcgtgcaggaagaaggccttcgggttgtaaactgctgtcagtatttaggaaacaacatattttaatagaatatgtcttgacta

SEQ ID NO: 8630 - DNA, 490 bp, unidentified
  misc_feature 1..490: note = Ascusbbf_137361, encodes 16S rRNA
  source 1..490: mol_type = genomic DNA
agagtttgatcatggctcagaacgaacgctggcggcaggcctaacacatgcaagtcgagcgtgaaagggaacttcggttcctgagtaaagcggcgcacgggtgagtaacacgtgaataatctgcccttatgaccgggataacagaccgaaaggactgctaataccggataagcttccgcgccaaccgggcgagtggagaaaagtacgggaccttcgggccgtacgcatgaggatgagttcgcgttccattagatagttggtgaggtaatggctcaccaagtctacgatggatagctggtctaagaggatgatcagccacactggaactgagacacggtccagactcctacgggaggcagcagtggggaatcttgcgcaatggaggaaactctgacgcagccatgccgcgtgagtgatgaaggccctcgggttgtaaagctctgtctaaggggacgaatggcgttatgaacaagacacatgacgattgacg

SEQ ID NO: 8631 - DNA, 490 bp, unidentified
  misc_feature 1..490: note = Ascusbbf_25994, encodes 16S rRNA
  source 1..490: mol_type = genomic DNA
agagtttgatcatggctcaggatgaacgctagctacaggcttaacacatgcaagtcgagcggaacaccttcgggtgtttagcggcagacgggtgagtaacacgtatccaacctttcccttacccgggtatagcctctggaaacggagagtaatccccgatgtggtgcacgttccgcatgttatgcgcaccaaagattcatcggtaaggggtggggatgcgttccattaggtagtaggcggggcaacggcccacctagccgatgatggataggggttctgagaggaaggtcccccacattggaactgcgacacggtccaaactcctacgggaggcagcagtgaggaatattggtcaatgggcgagagcctgaaccagccaagtagcgtgcaggatgacggccctatgggttgtaaactgcttttgtacgggaataacggtctttacgtgtagagatgtgcatgtaccgtacgaataaggatcggctaactc

SEQ ID NO: 8632 - DNA, 490 bp, unidentified
  misc_feature 1..490: note = Ascusbbf_29347, encodes 16S rRNA
  source 1..490: mol_type = genomic DNA
agagtttgatcatggctcaggacgaacgctggcggcgtgcttaatacatgcaagtcgaacgtgtactttcgggtacaagtggcgcacgggtgagtaacgcgtagatgatctacccttgagattgagataaccttgggaaactggggctaataccgaacaacgcacatctgttggttcagatgtgttaaagtggcgcaagtcacgcttgaggatgagtctgcggcctatcagttagttggtggggtaacggcctaccaagacgaagacgggtagctgatctgagaggatgatcagccacattgggactgagacacggcccaaactcctacgggaggcagcagtagggaatattgcgcaatggaggcaactctgacgcagcgacgccgcgtgagtgatgacggccattttggttgtaaagctctgtagagggggaagaatgttacggtgcagagccgtaagtgacggtacccctaaagtaaggaccggctaa

SEQ ID NO: 8633 - DNA, 490 bp, unidentified
  misc_feature 1..490: note = Ascusbbf_46657, encodes 16S rRNA
  source 1..490: mol_type = genomic DNA
agagtttgatcatggctcaggacgaacgctggcggcgtgcttcatacatgcaagtcgaacgagaagctcacttcggtgagtggaaagtggcggacgggtgagtaacatgtagggaatctacccttgggatggggacaacagctggaaacggctgctaaaacccgatatgagtattgttgagatataatacttgaaaactccggtgcccaaggatgagcctgcacctgattagctagttggtggtgtaatggactaccaaggcgacgatcagtagctggtttgagaggatgatcagccacaatgggactgagacacggcccatactcctacgggaggcagcagtagggaattttgcgcaatgggggaaaccctgacgcagcaacgccgcgtggacgaagaagcccttcggggtgtaaagttctgtcagtggggacgaacgaatgacggtacccacagaggaagcaccggctaactccgtgccagcagccgc

SEQ ID NO: 8634 - DNA, 490 bp, unidentified
  misc_feature 1..490: note = Ascusbbf_33697, encodes 16S rRNA
  source 1..490: mol_type = genomic DNA
agagtttgatcctggctcaggacgaacgctggcggcgtgcctaacacatgcaagtcgaacgggatgaaagaagcttgcttctggaatctagtggcggacgggtgagtaacacgtgagcaacctgcctttcagaggggaataatgtctggaaacggacactaataccgcatgacatattctgatcgcatgataaggatatcaaaggagcaatccgctgaaagatgggctcgcgtctgattagccagttggcggggtaacggcccaccaaagcgacgatcagtagccggactgagaggttgaacggccacattgggactgagacacggcccagactcctacgggaggcagcagtgggggatattgcacaatgggcgcaagcctgatgcagcaacgccgcgtgcgggaagacggtcttcggattgtaaaccgctgtcctctgtgacgataatgacggtagcagaggaggaagccacggctaactacgtgccag

SEQ ID NO: 8635 - DNA, 490 bp, unidentified
  misc_feature 1..490: note = Ascusbbf_124296, encodes 16S rRNA
  source 1..490: mol_type = genomic DNA
agagtttgatcctggctcaggatgaacgctagcggcaggcttaacacatgcaagtcgaggggcagcgagggtagcaatacctgtcggcgaccggcggaagggtgcgtaacgcgtgagcaacttgcccgtatctgggggatagtcactggaaacggtgcgtaataccccataacaacggatcccgcatgggaactgtttgaaagaatttcggatacggataggctcgcgagacattagctagttggcggggtaacggcccaccaaggcgacgatgtctaggggttctgagaggaaggtcccccacattggaactgagacacggtccaaactcctacgggaggcagcagtgaggaatattggtcaatggccgaaaggctgaaccagccatgccgcgtgcaggattaaggccctatgggtcgtaaactgcttttgtggtggagcaataagacgtacgtgtacgtcgatgagagtacatcacgaataagcatcg

SEQ ID NO: 8636 - DNA, 490 bp, unidentified
  misc_feature 1..490: note = Ascusbbf_1139841, encodes 16S rRNA
  source 1..490: mol_type = genomic DNA
agagtttgatcatggctcaggacgaacgctggcggcgtgcttaaaacatgcaagtcgaacgagaaaggggcttcggccctgagtagagtggcgcacgggtgagtaacacgtgaataatctacctgaggatttgggataacattccgaaaggagtgctaataccggataagcccacgacttcttcgaaagttgcgggaaaaggcgggaacttgttcctgctgtcttcagatgagttcgcggcccattagctagttggtgaggtaagggctcaccaaggcgacgatgggtagctggtctgagaggatgatcagccacactggaactgagacacggtccagactcctacgggaggcagcagtggggaattttgcgcaatgggcgaaagcctgacgcagcaacgccgcgtgagtgatgaaggctttcgagtcgtaaagctctgtcagaggggaagaacaacctggagttgaacaagctctgggcctgacggtac

SEQ ID NO: 8637 - DNA, 490 bp, unidentified
  misc_feature 1..490: note = Ascusbbf_91611, encodes 16S rRNA
  source 1..490: mol_type = genomic DNA
agagtttgatcatggctcaggatgaacgctggcggcaggcttaatacatgcaagtcggacggtaacgcgctggtagcaatactggtggcgacgagtggcggatgggtgcgtaacgcgtatgcaacctgccccttattggaggataacgttgtgaaaacggcgataatattccatgtgcacgctggggggcatcctctggtgtgtaaagattcattgataagggatgggcatgcgtatcattaggtagttggcggggtaacggcccaccaagccgacgatgattaggggtcctgagagggcaaccccccacactggaactgagacacggtccagactcctacgggaggcagcagtagggaatattgggcaatggaggcaactctgacccagccatgccgcgtgaaggaagacggccctatgggttgtaaacttcttttgttgcagagtaaaggcggggacgtgtccccgtgtgagagtatgcgacgaataa

SEQ ID NO: 8638 - DNA, 490 bp, unidentified
  misc_feature 1..490: note = Ascusbbf_76245, encodes 16S rRNA
  source 1..490: mol_type = genomic DNA
agagtttgatcctggctcaggacgaacgctggcggcgtgcttaaaacatgcaagtcgaacggagttaaattaagcttgcttaatttaacttagtggcggacgggtgagtaacgcgtgagcaatctgcctatcacaggggaataacgactggaaacgggcgctaataccgcatatgaccacaacctggcatcaggaaggggtgaaaggagagatccggtgatagatgagcttgcgtctcattagctagttggcgaggtaacggcccaccaaggcaacgatgagtagccgatctgagaggatgaacggccacattggaactgagaaacggtccaaactcctacgggaggcagcagttaggaatattgggcaatggaggaaactctgacccagcaacgccgcgtgaaggaagaaggtcttcggattgtaaacttctgatctgtggaaaaaataaagtgatggtaccacaggagcaagccacggctaactacgt

SEQ ID NO: 8639 - DNA, 490 bp, unidentified
  misc_feature 1..490: note = Ascusbbf_330869, encodes 16S rRNA
  source 1..490: mol_type = genomic DNA
agagtttgatcatggctcaggatgaacgctggcggcatgcctaagacatgcaagtcgaacgaggtggcccaatgaagatggagtgcttgcacaaagttggatttggatttccacctagtggcggacgggtgagtaacacgtgggtgacctacctttaagactgggataactactagaaatggtagctaataccggataacacatagtttcgtttctatgttaaaaggagcctttaaagcttcacttttagatgggcctgcggtgtattagctagtcggtggggtaacggcctaccgaggcaacgatgcatagccgaactgagaggttgatcggccacattgggactgagacacggcccaaactcctacgggagacagcagttaggaatattcgtcaatgggggaaaccctgaacgagcaatgccgcgtgaacgatgaaggccctatgggttgtaaagttctgttgtatgggaagaatggttaggatagga

SEQ ID NO: 8640 - DNA, 490 bp, unidentified
  misc_feature 1..490: note = Ascusbbf_103585, encodes 16S rRNA
  source 1..490: mol_type = genomic DNA
agagtttgatcatggctcaggacgaacgctggcggcgcgcctaacacatgcaagtcgaacggagcattgcgctgaaatgagaacagcttgctggaggaatttcatgcaatgcttagtggcggacgggtgagtaacacgtgagcaacctgcctttgtgagggggacaacatctggaaacggatgctaataccgcataatgtgtgcagatcgcatgatcagcacaccaaagatttatcgcacaaagatgggctcgcggctgattagatagttggcggggtaacggcccaccaagtcgacgatcagtagccggactgagaggttgaacggccacattgggactgagacacggcccagactcctacgggaggcagcagtgggggatattgcacaatggggggaaccctgatgcagcgacgccgcgtgagggaagaaggttttcggattgtaaacctctgtcttgcgggacgataatgacggtaccgcaggagga

SEQ ID NO: 8641 - DNA, 490 bp, unidentified
  misc_feature 1..490: note = Ascusbbf_100737, encodes 16S rRNA
  source 1..490: mol_type = genomic DNA
agagtttgatcatggctcaggataaacgctggcaccatgcctaatacatgcatgtcgtacgagagcttcggctcgagtggcaaatgggtgagtaacacgtaaggaacctgccctagcgacgaggataacggttggaaacgactgctaatactggatagtatatcgaaccgcatgatttgatatttaaagcagcttcggctgcacgctaggatggccttgcggcgcattagatagttggtgaggtaacggcccaccaagtcagtgatgcgtagctgaactgagaggttaaacagccacattgggactgagacacggcccaaactcctacgggaggcagcagtagggaattttcggcaatgggcgaaagcctgaccgagcaatggtgcgtgaacgatgaagatccttggatcgtaaagttcttttataagggaagaatacattaagtaggtaatgacttagtgctgacggtaccttttgaataagctccggc

SEQ ID NO: 8642 - DNA, 490 bp, unidentified
  misc_feature 1..490: note = Ascusbbf_50222, encodes 16S rRNA
  source 1..490: mol_type = genomic DNA
agagtttgatcatggctcaggacgaacgctggcggcgtgcttaatacatgcaagtcgaacgtgtaccttcgggtacaagtggcgcacgggtgagtaacgcgtagatgatctacccttgagtttgagataacctcgggaaactggggctaataccgaacaacgcatcggaattgggtttctgatgttaaagtggcgcaagtcacgcttgaggatgagtctgcggcctatcagttagttggtggggtaacggcctaccaagacgaagacgggtagctgatctgagaggatgatcagccacattgggactgagacacggcccaaactcctacgggaggcagcagtagggaatattgcgcaatggaggcaactctgacgcagcgacgccgcgtgagtgatgacggccattttggttgtaaagctctgtagagggggaagaatgttacggtgcagagccgtaagtgacggtacccctaaagtaaggaccggctaa

SEQ ID NO: 8643 - DNA, 490 bp, unidentified
  misc_feature 1..490: note = Ascusbbf_138255, encodes 16S rRNA
  source 1..490: mol_type = genomic DNA
agagtttgatcatggctcaggacgaacgctggcggcgtgcttaacacatgcaagtcgaacgggatttagtagacagaagcttcggtggaagattactaatgagagtggcgaacgggtgagtaacgcgtgagcaacctgcctatgacagtgggatagcctcgggaaaccgggattaataccgcataaaatcgtagaaacacatgttttaacggtcaaagaattatcggtcatagatgggctcgcgtctgattagctagttggtgagataacagcccaccaaggcgacgatcagtagccggtctgagaggatgaacggccacattggaactgagacacggtccaaactcctacgggaggcagcagtggggaatattgcacaatgggggaaaccctgatgcagcgacgccgcgtgaacgaagaaggtattcgtatcgtaaagttctgtcctatgggaagataatgacagtaccatagaagaaagctccggcta

SEQ ID NO: 8644 - DNA, 490 bp, unidentified
  misc_feature 1..490: note = Ascusbbf_92899, encodes 16S rRNA
  source 1..490: mol_type = genomic DNA
agagtttgatcatggctcaggatgaacgctggcggcgtgcctaacacatgcaagtcgaacgaagctctggttacggaggcttcggccaaagcaaccggatgactgagtggcggacgggtgagtaacgcgtgggcaacctgccccattatgggggatagcagttggaaacgactggtaataccgcataagcgcacgggaaggcatctttctgtgtgaaaagatttatcgtaatgggatggacccgcgtctgattagatagttggtgaggtaacggcccaccaagtcgacgatcagtagccggactgagaggtcggacggccacattgggactgagagacggcccaaactcctacgggaggcagcagtgggggatattgcacaatggggggaaccctgatgcagcgacgccgcgtgagtgaagaagtatttcggtatgtaaagctctatcgacagggaagaaaggccccgcaaggggagatgacggtacctg

SEQ ID NO: 8645 - DNA, 490 bp, unidentified
  misc_feature 1..490: note = Ascusbbf_205992, encodes 16S rRNA
  source 1..490: mol_type = genomic DNA
agagtttgatcatggctcaggatgaacgctagcggcaggcttaacacatgcaagtcgaggggcagcgcgggtagcaatacctggcggcgaccggcgcaagggtgcgtaacgcgtgagcaatctgcccgtgtcagggggataagcgatggaaacgtcgtctaataccgcataacaacggtcacggcatcatgaccgtttgaaagatacgtcggacacggatgagctcgcgagacattagctggttggcggggtaacggcccaccaaggctgcgatgtctaggggaactgagaggttggtcccccacactggaactgagacacggtccagactcctacgggaggcagcagtgaggaatattggacaatggtcggaagactgatccagccatgccgcgtggaggttaaggtcctatggattgtaaactccttttgagagggagcaataagtgtcacgtgtgacacgatgagagtacctttcgaataagcatcg

SEQ ID NO: 8646 - DNA, 490 bp, unidentified
  misc_feature 1..490: note = Ascusbbf_57276, encodes 16S rRNA
  source 1..490: mol_type = genomic DNA
agagtttgatcatggctcaggatgaacgctagcgacaggcctaacacatgcaagtcggggggcagcatgagcgtagcaatacgtttgatggcgaccggcgtacgggtgcgtaacgggtgtgcaatctgtccacagtcgggggatagcccgccgaaaggcgaattaagactccatgtgatgttatgaggcatcttgtgacattgaaacgcgaggactgtgggtgagcacgcttctgattagatagttggtagggtaacggcctaccaagtcgacgatcagtaggggttctgagaggaagatcccccacattggaactgagacacggtccagactcctacgggaggcagcagtgaggagtattggtcaatgggcgagagcctgaaccagccaagtcgcgtgaaggaagaaggttctatggattgtaaacttcttttattcgagggtaaagtgtgtcatgcgtggcatattgcaagtatcgaatgaataagca

SEQ ID NO: 8647 - DNA, 490 bp, unidentified
  misc_feature 1..490: note = Ascusbbf_199816, encodes 16S rRNA
  source 1..490: mol_type = genomic DNA
agagtttgatcctggctcaggacgaacgctggcggcgtgcttaacacatgcaagtcgaacggattaggtctagtacttgtactagtcttaattagtggcggactggtgagtaacgcgtgagcaacctacctctaacagggggataacacttagaaataggtgctaataccgcataatattgtttaccggcatcggtgaatgatcaaagtgaatatagcggttagagatgggctcgcgtatcattagctagttggtgaggtaacggcccaccaaggcgacgatgattagccgatctgagaggatgaccggccacactgggactgagatacggcccagactcctacgggaggcagcagtggggaatattgggcaatggaggaaactctgacccagcaacgccgcgtgaaggaagaaggccttcgggttgtaaacttctgttatgagggaaaaagaagtgatggtacctcatgagaaagctacggctaactac

SEQ ID NO: 8648 - DNA, 490 bp, unidentified
  misc_feature 1..490: note = Ascusbbf_181971, encodes 16S rRNA
  source 1..490: mol_type = genomic DNA
agagtttgatcatggctcaggatgaacgctggcggcgtgcctaacacatgcaagtcgaacgaagctcccctacggatctcttcggagtgaaggaggggatgactgagtggcggacgggtgagtaacgcgtgggtaatctgccctgtacagggggacaacagccagaaatagctgctaataccgcatgagcgcacagcaccgcatggtgcagtgtgaaaaactgaggtggtacaggatgagcccgcgtctgattagttagttggcagggtaacggcctaccaagacgacgatcagtagccggcctgagagggtgaacggccacattgggactgagacacggcccagactcctacgggaggcagcagtggggaatattgcacaatgggggaaaccctgatgcagcaacgccgcgtgagtgaagaagtatctcggtatgtaaagctctatcagcagggaagaaaatgacggtacctgactaagaagctccggc

SEQ ID NO: 8649 - DNA, 490 bp, unidentified
  misc_feature 1..490: note = Ascusbbf_422659, encodes 16S rRNA
  source 1..490: mol_type = genomic DNA
agagtttgatcctggctcaggatgaacgctagctacaggcttaacacatgcaagtcgaggggcagcatgatcttagcttgctaagattgatggcgaccggcgcacgggtgcgtaacgcgtatccaacctgccgtgtacttggggatagccctctgaaaggaggattaatacccgatgtggttacggagagacatctctctgtaattaaagatttatcggtacaccgatggggatgcgtacgattagctagttggcggggtaacggcccaccaaggcgacgatcgttaggggttctgagaggaaggtcccccacataggaactgagacacggtcctaactcctacgggaggcagcagtgaggaatattggtcaatgggcgagagcctgaaccagccaagtagcgtgaaggaagactgccctatgggttgtaaacttcttttatcggggaataaagtgcgtcacgtgtggcgttttgtatgtacccgatgaa

SEQ ID NO: 8650 - DNA, 490 bp, unidentified
  misc_feature 1..490: note = Ascusbbf_108551, encodes 16S rRNA
  source 1..490: mol_type = genomic DNA
agagtttgatcatggctcagaacgaacgctggcggcgcgtcttaagcatgcaagtcgaacggcaagatggaagcttgcttctatcctagagtggcggactggtgagtaacgcgtgggtgatttgccctccggacgggaatagccggtagaaataccggataatgccggatacggtgcagtgtgtcagaggcactgcaggaaaggaactttagttccgccggaggagaagcccgcgtaccattagctagttggtgaggtaacggcccaccaaggcgatgatggttacccggcctaagagggtgatcgggcacattgggactgagatacggcccagactcctacgggaggcagcagctaagaatattccgcaatggacgaaagtctgacggagcgacgccgcgtggatgatgaaggccggaaggttgtaaaatccttttaagcatgaagaataaggagactgagagaaacggtctctggtgacggtagtgct

SEQ ID NO: 8651 - DNA, 470 bp, unidentified
  misc_feature 1..470: note = Ascusbbf_84323, encodes 16S rRNA
  source 1..470: mol_type = genomic DNA
agagtttgatcatggctcagaacgaacgctggcggcaggcctaacacatgcaagtcgaacgcatccttcgggatgagtggcagacgggtgagtaacacgtgggaatctacccaatggtgcggaataacacagggaaacttgtgctaataccgcataagcccttcgggggaaagatttatcgccattggatgagcccgcgtcggattagcttgttggtagggtaatggcctaccaaggcgacgatccgtagctggtctgagaggatgatcagccacactgggactgagacacggcccagactcctacgggaggcagcagtggggaatattggacaatgggcgcaagcctgatccagccatgccgcgtgagtgatgaaggccttagggttgtaaagctctttcagcggggaagataatgacggtacccgcagaagaagccccggctaacttcgtgccagcagccgcggtaat

SEQ ID NO: 8652 - DNA, 490 bp, unidentified
  misc_feature 1..490: note = Ascusbbf_212954, encodes 16S rRNA
  source 1..490: mol_type = genomic DNA
agagtttgatcatggctcaggatgaacgctggcggcgtgcctaacacatgcaagtcgagcggagatagatggaagcctagcgatgtctatcttagcggcggatgggtgagtaacacgtgggtaacctgccctgtactgggggataacagctggaaacggctgttaataccgcatatgcgcacggagccgcatggccctgggcggaaagattaatcggtacaggatgggcccgcgccggattaacttgttggcggggtaacggcccaccaaggtgatgatccgtagccgacctgagagggtgaccggccacattgggactgagacacggcccaaactcctacgggaggcagcagtgggggatattgcacaatgggggaaaccctgatgcagcgacgccgcgtgaaggatgacgtatttcggtatgtaaacttctatcagcggggaagaagatgacggtacccgcacaagaagccccggctaactacgtgcc

SEQ ID NO: 8653 - DNA, 490 bp, unidentified
  misc_feature 1..490: note = Ascusbbf_1425345, encodes 16S rRNA
  source 1..490: mol_type = genomic DNA
agagtttgatcctggctcaggatgaacgctggcggcgtgcctaatacatgcaagtcgagcgaatgaatgggagcttgctccctgacattagcggcggacgggtgagtaacacgtgggcaacctgccctgcagatggggataactccgggaaaccggggctaataccgaataatcagttcctccgcatggaggaactctgaaagacggtttcggctgtcactgcaggatgggcccgcggcgcattagctagttggtggggtaatggcctaccaaggcaacgatgcgtagccgacctgagagggtgatcggccacactgggactgagacacggcccagactcctacgggaggcagcagtagggaatcttccacaatggacgaaagtctgatggagcaacgccgcgtgagcgaagaaggttttcggatcgtaaagctctgttgtgagggaagaacaagtacgggagtaactgcccgtaccttgacggtacctc

SEQ ID NO: 8654 - DNA, 490 bp, unidentified
  misc_feature 1..490: note = Ascusbbf_672647, encodes 16S rRNA
  source 1..490: mol_type = genomic DNA
agagtttgatcatggctcaggacgaacgctggcggcgtgcttaacacatgcaagtcgaacgagacttagggaagagcttgctcggaactatgtcgagtggcggacgggtgagtaacgcgtgaataatctgtctcatacagggggataacgcatcgaaagatatgctaataccgcgtaggaccacagtgtcgcatggcacaggggtgaaaggagcaatccagtatgaggtgagttcgcgtctgattagatagttggtgaggtaacggcccaccaagtcaacgatcagtagccgacctgagagggtgatcggccacattgggactgagacacggcccagactcctacgggaggcagcagtggggaatattgggcaatgggcgaaagcctgacccagcaacgccgcgtgaaggaagaaggttttcggatcgtaaacttctgtcctatatgaagagcagtagacggtagtataggaggaagccccggctaacta

SEQ ID NO: 8655 - DNA, 490 bp, unidentified
  misc_feature 1..490: note = Ascusbbf_739065, encodes 16S rRNA
  source 1..490: mol_type = genomic DNA
agagtttgatcctggctcaggatgaacgctggcggcgtgcctaacacatgcaagtcgaacgaagctctgagacggaatcttcggaggaagtcgaggaagacttagtggcggacgggtgagtaacgcgtgagcaacctgcctttcggagggggataacgattggaaacgatcgctaataccgcataacatatacatatcgcatggtatatatatcaaagctgaggcgccgaaagatgggctcgcgtccgattagatagttggtgaggtaacggctcaccaagtcgacgatcggtagccggactgagaggttgaacggccacattgggactgagacacggcccagactcctacgggaggcagcagtgggggatattgcacaatgggcgaaagcctgatgcagcaacgccgcgtgagggaagacggttttcggattgtaaacctctgtctttggtgaagaagcaagtgacggtaaccgaggaggaagccacgg

SEQ ID NO: 8656 - DNA, 490 bp, unidentified
  misc_feature 1..490: note = Ascusbbf_158082, encodes 16S rRNA
  source 1..490: mol_type = genomic DNA
agagtttgatcatggctcaggatgaacgctagcggcaggcctaacacatgcaagtcgaggggtaacgcgaggtagcaataccttggcgacgaccggcgcacgggtgcgtaacgcgtatgcaacctacctttaagagggggataacggagggaaacttccactaataccccgtatagtcacagggccgcatgaccctgtgacgaaagcttcggtgcttaaagatgggcatgcgtgacattagctagttggcggggcaacggcccaccaaggctgcgatgtctaggggagctgagaggctaatcccccacactggtactgagacacggaccagactcctacgggaggcagcagtgaggaatattggtcaatggtcggaagactgaaccagccatgccgcgtgagggaagaaggccctatgggttgtaaacctcttttgcacgggagtaataagggtcttgcgaggtccgatgagagtaccgtgcgaataagc

SEQ ID NO: 8657 - DNA, 490 bp, unidentified
  misc_feature 1..490: note = Ascusbbf_298595, encodes 16S rRNA
  source 1..490: mol_type = genomic DNA
agagtttgatcatggctcaggatgaacgctggcggcgtgcgtaacacatgcaagttgagcgacgacgtttctgaagtggcaacatggaagggacgagcggagcagcggacgggtgagtaagacatgagaagctgtcctgtggtggggggcaacgtctggaaacggacgctaataccccatatgccgagaggtgaaagccgcaaggtgccataggaggtgctcgtggcctatcagctagttggtgaggtaatggctcaccaaggcgacgacgggtagccggcctgagagggtgaccggccacactgggactgagatacggcccagactcctacgggaggcagcagtggggaatattgggcaatgggagcaatcctgacccagcgacgccgcgtgaatgacgaaggccttcgggtcgtaaagttcttttatgtgggaagaagaaagtgacggtaccacatgaataagccccggctaactacgtgccagcagc

SEQ ID NO: 8658 - DNA, 490 bp, unidentified
  misc_feature 1..490: note = Ascusbbf_181725, encodes 16S rRNA
  source 1..490: mol_type = genomic DNA
agagtttgatcatggctcagagtgaacgctggcggcgtggctaagacatgcaagtcgggcggtcatatgctttcgggcatatgatagcggcaaacgggtgagtaacacgtaagtaacctacccttaagactgggatagcccagcgaaagttggggtaataccggatgataaccgtgggagcattttcatggatttaaaggtatgagaagacgcttaaggaggggcttgcggcctatcagctagttggaggtgtaacggacccccaaggcgaagacgggtagccggtctgagaggacgaacggccacattggaactgagacacggtccagacatctacggatggcagcagtttcgaattattcacaatgggcgaaagcctgatggtgcgacgtcgcgtggaggaagaaggtctttggattgtaaactcctgtcattagggagcaaagtgcaagtggagagcttgttttgagttaacctaaagaggaagcag

SEQ ID NO: 8659 - DNA, 490 bp, unidentified
  misc_feature 1..490: note = Ascusbbf_648223, encodes 16S rRNA
  source 1..490: mol_type = genomic DNA
agagtttgatcatggctcaggatgaacgctagctacaggcttaacacatgcaagtcgaggggcagcatggtcttagcttgctaaggctgattgcgaccggcgcacgggtgagtaacgcgtatccaacctttcccctggtagggcatagcccggcgaaagtcggattaataccctatgttatccgaagaggacatctgattcggatcaaagatttatcgccatgggatggggatgcgtccgattaggttgacggcggggtgacggcccaccgtgcccgcgatcggtaggggttctgagaggaaggtcccccacattggaactgagacacggtccaaactcctacgggaggcagcagtgaggaatattggtcaatgggcgtaagcctgaaccagccaagtagcgtgcgggacgacggccctatgggttgtaaaccgcttttgcaggggaataaagtgaggcacgtgtgcctttttgcatgtaccctgagaat

SEQ ID NO: 8660 - DNA, 490 bp, unidentified
  misc_feature 1..490: note = Ascusbbf_423786, encodes 16S rRNA
  source 1..490: mol_type = genomic DNA
agagtttgatcctggctcagaacgaacgctggcggcgcgtcttaagcatgcaagtcgaacggcagggcgggtgcttgcacctgcctcagagtggcggactggtgagtaacacgtgggtgacttacccttcggatggggatagcctttagaaataaggggtaataccgaatacggttgccggcgataagggccggtaaggaaaggagctacggctccgccgaaggagaggcctgcggcctattagttagttggtggggtaacggcctaccaaggcaatgacgggtatccggcctgagagggtgaacggacacattgggactgagatacggcccagactcctacgggaggcagcagctaagaatattccgcaatggacgaaagtctgacggagcgacgccgcgtggacgatgaaggccggaaggttgtaaagtccttttggatatgaggaataaacactgcagggaatggcagtgcggtgactgtagtatct

SEQ ID NO: 8661 - DNA, 490 bp, unidentified
  misc_feature 1..490: note = Ascusbbf_89651, encodes 16S rRNA
  source 1..490: mol_type = genomic DNA
agagtttgatcatggctcaggatgaacgctagcgacaggcctaacacatgcaagtcgaggggcagcggggtgcttgcaccgccggcgaccggcgcacgggtgagtaacgcgtatgcgacctgcccgccaccgcgggatagcctcccgaaagggagattaacaccgcatggtccggagcctataaaggggttccggcaaacgcgagggtggcggatgggcatgcgtcccattaggcagcaggcggggtaacggcccacctggccgacgatgggtaggggtcctgagagggaggtcccccacactggtactgagacacggaccagactcctacgggaggcagcagtgaggaatattggtcaatgggcgagagcctgaaccagccatgtcgcgtgcaggactacggccctacgggtcttaaactgcttttgattggggataaaggaggggacgcgtccccttttgcaggtaccaatcgaataaggatcggcta

SEQ ID NO: 8662 - DNA, 490 bp, unidentified
  misc_feature 1..490: note = Ascusbbf_188084, encodes 16S rRNA
  source 1..490: mol_type = genomic DNA
agagtttgatcatggctcaggatgaacgctggcggcgtgcctaacacatgcaagtcgagcgggagtatcgcaaacagagattcgtcaaagtgagcgatatgagagcggcggacgggtgagtaacgcgtaggtaacctaccttaagctgagggataacccagggaaacttgggataataccacataacgcggtgaagtcacatggctttaccgccaaagatttatcggcgtaagatggacctgcgtctgattagccagttggtggggtaacggcctaccaaagcaacgatcagtagccgacctgagagggtgatcggccacattggaactgagacacggtccaaactcctacgggaggcagcagtggggaatattgcacaatgggcgcaagcctgatgcagcaacgccgcgtgagcgaagaaggtcttcggatcgtaaagctctgtccttggggacgaaggaagtgacggtacccaaggaggaagccccgg

SEQ ID NO: 8663 - DNA, 490 bp, unidentified
  misc_feature 1..490: note = Ascusbbf_302055, encodes 16S rRNA
  source 1..490: mol_type = genomic DNA
agagtttgatcatggctcaggatgaacgctagcggcaggcttaacacatgcaagtcgaggggcagcgcggggagcaatctctggcggcgaccggcggaagggtgagtaacgcgtgagcaacatgccctgtggagggggatagtcactggaaacggtgcgtaataccccgtaacaacggaggaggcatctcttctgtttaaaagattcattgtcacaggattggctcgcgtctgattaggtagttggcggggtaacggcccaccaagccgacgatcagtaggggttctgagaggaaggtcccccacattggaactgagacacggtccagactcctacgggaggcagcagtgaggaatattggacaatggccgagaggctgatccagccatgccgcgtgatggaataaggccctatgggtcgtaaacatcttttgagagggagcaataaggacgtcgtgacgtccgatgagagtacctttcgaataagcatc

SEQ ID NO: 8664 - DNA, 490 bp, unidentified
  misc_feature 1..490: note = Ascusbbf_254264, encodes 16S rRNA
  source 1..490: mol_type = genomic DNA
agagtttgatcatggctcaggatgaacgctggcggcgtgcgtaacacatgcaagttgagcgacgacgtgctggaagtggcgacatggaaggcatgagcggagcagcggacgggtgagtataacatgagaagctgtccaatggcggggggcaacgtctggaaacggacgctaataccccataagccgagaggtaaaagccgaaaggcgccaagggaggcgctcgtgccctatcagctagttggtgaggtaatggctcaccaaggcgacgacgggtagccggcctgagagggtgaccggccacactgggactgagatacggcccagactcctacgggaggcagcagtggggaatattgggcaatgggagaaatcctgacccagcgacgccgcgtgaacgaagaaggccttcgggtcgtaaagttcttttatgggggaagaaggaagtgacggtaccccatgaataagccccggctaactacgtgccagcagc

SEQ ID NO: 8665 - DNA, 481 bp, unidentified
  misc_feature 1..481: note = Ascusbbf_92821, encodes 16S rRNA
  source 1..481: mol_type = genomic DNA
agagtttgatcatggctcagaacgaacgctggcggcaggcctaacacatgcaagtcgaaggagaagttcctcttcggagggatggacactggcgcacgggtgagtaacgcgtgggaatctaccccggggtggggaataaccgctggaaacggcggctaataccgcatacgccgtattgggaaagctttagcgccctgggatgagcccgcgttagattagctagttggtggggtaatggcccaccaaggcgacgatctatagctggtctgagaggatgatcagccacactgggactgagacacggcccagactcctacgggaggcagcagtggggaatattggacaatgggggcaaccctgatccagccatgccgcgtgcgtgaagaaggccttagggttgtaaagcgctttcactggtgaagatgatgacggtagccagagaagaagccccggctaactccgtgccagcagccgcggtaat

SEQ ID NO: 8666 - DNA, 490 bp, unidentified
  misc_feature 1..490: note = Ascusbbf_77405, encodes 16S rRNA
  source 1..490: mol_type = genomic DNA
agagtttgatcatggctcaggacgaacgctggcggtatgcttaacacatgcaagtcgaacgggcgttaaagagcttgctctttttctgctagtggcggacgggtgagtaacgcgtgagtaatctgccttgaagtgggggataacacttagaaatgagtgctaataccgcgtgatgtactagcttcgcatgaagcctgtaccatagtttttcgcttcaagatgagctcgcgtccgattagtttgttggcgaggtaaatgctcaccaagactgcgatcggtagccgggttgagagaccgaccggccacattgggactgagacacggcccagactcctacgggaggcagcagtggggaatattgcacaatgagggaaaccttgatgcagcaataccgcgtgagggatgaaggctcttgggttgtaaacctctgtccaaagggacgaattttgacggtacctttgaagaaagctccggctaactacgtgccagc

SEQ ID NO: 8667 - DNA, 490 bp, unidentified
  misc_feature 1..490: note = Ascusbbf_759206, encodes 16S rRNA
  source 1..490: mol_type = genomic DNA
agagtttgatcatggctcaggacgaacgctggcggcgtgcctaatacatgcaagtcgagcggacgaatcgaaagcttgcttttgattcgttagcggcggacgggtgagtaacacgtgggcaacctgccctgtagacggggataacaccgagaaatcggtgctaataccggataacacgaaatgtcgcatgacgtttcgttgaaagacggcgcaagctgtcgctacaggatgggcccgcggcgcattagctagttggtgaggtaacggctcaccaaggcgacgatgcgtagccgacctgagagggtgatcggccacactgggactgagacacggcccagactcctacgggaggcagcagtagggaatcttccgcaatggacgaaagtctgacggagcaacgccgcgtgagcgaagaaggccttcgggtcgtaaagctctgttgttagggaagaacaagtaacgcagtaactggcgttaccgtgacggtacc

SEQ ID NO: 8668 - DNA, 490 bp, unidentified
  misc_feature 1..490: note = Ascusbbf_289467, encodes 16S rRNA
  source 1..490: mol_type = genomic DNA
agagtttgatcatggctcagaacgaacgttagcggcgcgcttaacacatgcaagtcgaacgagaaagggtgccttcgggtaccccggtaaagtggcgcacgggtgagtaacacgtgggtaacctacccccgggcgggggataacgtaccgaaagggacgctaataccgcataagaccacggcctgaaacggttgaggtcaaagtgagcctcttcatgaaagctcacacctggggatgggcccgcggcccatcaggttgttggtggggtaacggcctaccaagcctaagacgggtagctggtctgagaggatgatcagccacactggaactgagacacggtccagactcctacgggaggcagcagtggggaatcttgcgcaatgggcgaaagcctgacgcagcgacgccgcgtgagtgatgaaggccctagggttgtaaagctctgtggagagggacgaataagccatggttaatagccatggtgatgacg

SEQ ID NO: 8669 - DNA, 490 bp, unidentified
  misc_feature 1..490: note = Ascusbbf_1595900, encodes 16S rRNA
  source 1..490: mol_type = genomic DNA
agagtttgatcatggctcaggatgaacgctagcggcaggcttaacacatgcaagtcgaacggagcttgagagcttgctttcaagcttagtggcggacgggtgagtaacgcgtgagcaacctgcctctaagtggggaataatgtactgaaaaggacactaataccgcataatgtatatgagtcgcatggcttgtgtaccaaagatttatcgcttagagatgggctcgcgtccgattagccagttggtggggtaacggcctaccaaagcaacgatcggtagccggactgagaggttgaacggccacattgggactgagacacggcccagactcctacgggaggcagcagtgggggatattgcgcaatgggggaaaccctgacgcagcaatgccgcgtgaaggatgaaggtcttcggattgtaaacttcttttgttggggatgaataatgacggtacccaacgaataagctccggctaactacgtgccagcag

SEQ ID NO: 8670 - DNA, 490 bp, unidentified
  misc_feature 1..490: note = Ascusbbf_1484439, encodes 16S rRNA
  source 1..490: mol_type = genomic DNA
agagtttgatcatggctcaggatgaacgctggcggcgtgcctaacacatgcaagtcgaacggacttttcatcttagaggcttcggccaaagaggtttaaagttagtggcggacgggtgagtaacgcgtggagaacctgcctcatgctgggggataacagtgagaaatcactgctaataccgcataagcgcacgaaggcgcatgcctttgtgtgaaaaactccggtggcatgagatggctccgcgttggattagccagttggcggggtaacggcccaccaaagcatcgatccatagccggcctgagagggtgaacggccacattgggactgagacacggcccagactcctacgggaggcagcagtggggaatattgcacaatggggggaaccctgatgcagcgacgccgcgtgaaggaagaagtatctcggtatgtaaacttctatcgacagggaagataatgacggtacctgaataagaagccccggcta

SEQ ID NO: 8671 - DNA, 490 bp, unidentified
  misc_feature 1..490: note = Ascusbbf_376252, encodes 16S rRNA
  source 1..490: mol_type = genomic DNA
agagtttgatcctggctcaggatgaacgctagctacaggcttaacacatgcaagtcgaggggcatcaggaagaaagcttgctttctttgctggcgaccggcgcacgggtgagtaacacgtatccaacctgccctttactcggggatagcctttcgaaagaaagattaatacccgatggcataatgattccgcatggtttcattattaaaggattccggtaaaggatggggatgcgttccattaggttgttggtgaggtaacggcccaccaagccttcgatggataggggttctgagaggaaggtcccccacattggaactgagacacggtccaaactcctacgggaggcagcagtgaggaatattggtcaatgggcgctagcctgaaccagccaagtagcgtgaaggatgaaggctctatgggtcgtaaacttcttttatataagaataaagtgcagtatgtatactgttttgtatgtattatatgaata

SEQ ID NO: 8672 - DNA, 490 bp, unidentified
  misc_feature 1..490: note = Ascusbbf_228896, encodes 16S rRNA
  source 1..490: mol_type = genomic DNA
agagtttgatcctggctcaggacgaacgctggcggcatgcctaacacatgcaagtcgaacggagctgagagagcttgctttttcagcttagtggcggacgggtgagtaacgcgtgagtaacctgcctttcagtggggaataatgttctgaaaaggacactaataccgcataacgtatagaggccgcatgacctttgtaccaaagatttatcgctgagagatggactcgcgtccgattagccagttggtggggtaacggcctaccaaagcaacgatcggtagccggactgagaggttgaacggccacattgggactgagacacggcccagactcctacgggaggcagcagtgggggatattgcgcaatggggggaaccctgacgcagcaatgccgcgtgaaggatgaaggtcttcggattgtaaacttcttttgtcaaggacgaaagttgacggtacttgacgaataagctccggctaactacgtgccagc

SEQ ID NO: 8673 - DNA, 490 bp, unidentified
  misc_feature 1..490: note = Ascusbbf_162375, encodes 16S rRNA
  source 1..490: mol_type = genomic DNA
agagtttgatcatggctcagagtgaacgctggcggcgtggttaagacatgcaagtcgagcgggatttatcatcatgagtcttcggataaatgaggatgatgagagcggcaaacgggtgcgtaacacgtaaacaacttgccctttagtctgggatagctcaccgaaaggtggattaataccggatgtggttttctttcgcatgaaagagatactaaagcttgcaatggcgctagaggagaggtttgcgtcctatcagcttgatggtgaggtgaaggcttaccatggctaagacgggtagctggtctgagaggatgatcagccacagtggaactgagatacggtccacacacctacgggtggcagcagtttcgaatcattcacaatgggcgaaagcctgatggtgcaacgccgcgtgggggatgaaggttctcgaatcgtaaacccctgtcgccgaggaacaaaatctgggttcatagtccggcttgagtta

SEQ ID NO: 8674 - DNA, 490 bp, unidentified
  misc_feature 1..490: note = Ascusbbf_125948, encodes 16S rRNA
  source 1..490: mol_type = genomic DNA
agagtttgatcatggctcaggatgaacgctggcggcaggcttaatacatgcaagtcggacggtaacatgcgggtagcaatacctgtgatgacgagtggcggatgggtgcgtaacgcgtatgcaacctgccccttattggaggataacgttgtgaaaacggcgataatattccatgtgtaccctggggggcatcccttggggtataaagattcattgataagggatgggcatgcgtatcattaggtagttggcggggtaacggcccaccaagccgacgatgattaggggtcctgagagggcaaccccccacactggaactgagacacggtccagactcctacgggaggcagcagtagggaatattgggcaatggaggcaactctgacccagccatgccgcgtgaaggaaggcggtcctatggattgtaaacttcttttgttgcagagtaaaggcggggacgcgtccccgtgtgagagtatgcgacgaataa

SEQ ID NO: 8675 - DNA, 490 bp, unidentified
  misc_feature 1..490: note = Ascusbbf_211093, encodes 16S rRNA
  source 1..490: mol_type = genomic DNA
agagtttgatcatggctcaggatgaacgctggcggcgtgcttaacacatgcaagtcgaacggagagaaatataggaagttttcggatggaatatatggatcttagtggcggacgggtgagtaacgcgtaaacaatctgccttagagagggggataacagatagaaatatttgctaataccgcataagaccacagtgaggcatctcacaggggtaaaaggagaaatccgctttaagatgagtttgcgtactattagctagttggtgaggtaacggcccaccaaggcaacgatggttagccggcctgagagggtgaacggccacattggaactgagaaacggtccagactcctacgggaggcagcagtgaggaatattgggcaatggaggaaactctgacccagcaacgccgcgtgaaggaagaaggttttaggattgtaaacttctgttataggggaagaaaaagatgacggtaccctatgagaaagctac

SEQ ID NO: 8676 - DNA, 490 bp, unidentified
  misc_feature 1..490: note = Ascusbbf_83865, encodes 16S rRNA
  source 1..490: mol_type = genomic DNA
agagtttgatcatggctcaggatgaacgctggcggcgtgcttaacacatgcaagtcgaacggaggttatgacttcggttgtaaccttagtggcggacgggtgagtaacgcgtgggcaacctgccttacaccgggggataacagttggaaacgactgctaataccgcataagaccacagtaccgcatggtacaggggtaaaagccgagacgatgtaagatggacccgcgtctgattagctggttggtgaggtaacggcccaccaaggcgacgatcagtagccgacctgagagggtgatcggccacattgggactgagacacggcccaaactcctacgggaggcagcagtggggaatattgcacaatggggggaaccctgatgcagcgacgccgcgtgagtgaagaagtatttcggtatgtaaagctctatcagcagggaagataatgacggtacctgactaagaagcaccgactaaatacgtgccagcagc

SEQ ID NO: 8677 - DNA, 490 bp, unidentified
  misc_feature 1..490: note = Ascusbbf_191122, encodes 16S rRNA
  source 1..490: mol_type = genomic DNA
agagtttgatcatggctcaggatgaacgctggcggcgtgcctaacacatgcaagtcgaacggactgataggtgcttgcaccttgaaagttagtggcggacgggtgagtaacgcgtgagtaacctgcccttcagagggggacaacagttggaaacgactgctaataccgcataagaccacactatcgcatggtagagaggtcaaaggagcaatccgctgaaggatggactcgcgtccgattagatagttggcggggtaacggcccaccaagtcgacgatcggtagccggactgagaggttgaacggccacattgggactgagacacggcccagactcctacgggaggcagcagtgagggatattgcacaatgggcgcaagcctgatgcagcaacgccgcgtgaaggatgaaggttttcggattgtaaacttcttttctcattgacgaactcttgacggtaaatgaggaataagccacggctaactacgtgc

SEQ ID NO: 8678 - DNA, 490 bp, unidentified
  misc_feature 1..490: note = Ascusbbf_179140, encodes 16S rRNA
  source 1..490: mol_type = genomic DNA
agagtttgatcctggctcaggacgaacgctggcggcgtgcctaacacatgcaagtcgaacggagccaaccgacggaagccttcgggcagaagatggtgaagcttagtggcggacgggtgagtaacgcgtgagtaacctgcctgtaagagggggataacacagagaaatctgtgctaataccccatattgaatatatttcgcatggaaaatatttgaaagatttatcgcttacagatggactcgcgtctgattagatagttggtagggtaacggcctaccaagtcgacgatcagtagccgaactgagaggttgatcggccacattgggactgagacacggcccagactcctacgggaggcagcagtgggggatattgcgcaatggggggaaccctgacgcagcaacgccgcgtgaaggaagaaggtcttcggattgtaaacttctgttcttagggaagaataagatgacggtacctaaggagcaagtcacg

SEQ ID NO: 8679 - DNA, 490 bp, unidentified
  misc_feature 1..490: note = Ascusbbf_714263, encodes 16S rRNA
  source 1..490: mol_type = genomic DNA
agagtttgatcatggctcagagcgaacgctagctacaggcttaacacatgcaagtcgagcggaacaccttcgggcgtttagcggcagacgggtgagtaacacgtatccaacctttcccttactcgggtatagcctcgggaaactgagagtaatccccgatgtggtgcactgaaagcattttttgcgcacgaaagatttatcggtaaggggtggggatgcgttccattaggtagtaggcggggtaacggcccacctagccgatgatggataggggttctgagaggaaggtcccccacattggaactgcgacacggtccaaactcctacgggaggcagcagtgaggaatattggtcaatgggcgagagcctgaaccagccaagtagcgtgcaggatgacggccctatgggttgtaaactgcttttgtacgggaataaagtgacccacgtgtgggtttttgcatgtaccgtaagaataaggaccggctaattc

SEQ ID NO: 8680 - DNA, 473 bp, unidentified
  misc_feature 1..473: note = Ascusbbf_183632, encodes 16S rRNA
  source 1..473: mol_type = genomic DNA
agagtttgatcatggctcagaacgaacgctggcggcaggcctaagtcatgcaagttgaacggctgtagcaatacagcagtagcggacgggtgagtaatgtatgggaacgtatcttctagtggggaatattctttggaaacgaagagcaataccgcataagtcctacgggagaaagtcgcaagacgctagatgagcggcccatattggattagctagttggttgggtaatggctgaccaaggcaacgatccatagctggtctaagaggacgatcagccacattgggactgagacacggcccagactcctacgggaggcagcagtcaggaatattggacaatgggggcaaccctgatccagccatgccgcgtgagtgttaaggtcttcggattgtaaagctcttttgtgtgggaaaatgatgatggtaccacaagaataagcaccggctaacttcgtgccagcagccgcggtaat

SEQ ID NO: 8681 - DNA, 490 bp, unidentified
  misc_feature 1..490: note = Ascusbbf_310885, encodes 16S rRNA
  source 1..490: mol_type = genomic DNA
agagtttgatcctggctcagattgaacgctggcggcaggcctaacacatgcaagtcgagcggcagcgacaacattgaaccttcgggggatttgttgggcggcgagcggcggacgggtgagtaatgcctgggaaattgccctgatgtgggggataaccattggaaacgatggctaataccgcatgatagcttcggctcaaagagggggaccttcgggcctctcgcgtcaggatatgcccaggtgggattagctagttggtgaggtaagggctcaccaaggcgacgatccctagctggtctgagaggatgatcagccacactggaactgagacacggtccagactcctacgggaggcagcagtggggaatattgcacaatgggcgcaagcctgatgcagccatgccgcgtgtatgaagaaggccttcgggttgtaaagtactttcagcagtgaggaagggggtatcgttaatagcggtatcctttgacgtta

SEQ ID NO: 8682 - DNA, 490 bp, unidentified
  misc_feature 1..490: note = Ascusbbf_150905, encodes 16S rRNA
  source 1..490: mol_type = genomic DNA
agagtttgatcatggctcaggatgaacgctggcggcgtgcttaacacatgcaagtcgaacggagatgcgtagtagaagttttcggatggaaattgcacatcttagtggcggacgggtgagtaacacgtaaacaatctgccttcaagagcgggacaacagatagaaatatttgctaataccgcataagaccacagaaacgcatgttttaggggtaaaagggagcaattcgcttgaagatgagtttgcggactattagctagttggtgaggtaacggcccaccaaggcaaagatggttagccgacctgagagggtgatcggccacactggaactgagatacggtccagactcctacgggaggcagcagtgaggaatattgggcaatggaggaaactctgacccagcaacgccgcgtgaaggaagaaggttttaggattgtaaacttctgttatggaggaaaaaggaagtgatggtactccatgagcaagcta

SEQ ID NO: 8683 - DNA, 490 bp, unidentified
  misc_feature 1..490: note = Ascusbbf_126975, encodes 16S rRNA
  source 1..490: mol_type = genomic DNA
agagtttgatcatggctcaggatgaacgctagcggcaggcttaacacatgcaagtcgaggggtaacaggcggtagcaatactgtgctgacgaccggcgcacgggtgcgtaacgcgtatgcaacctaccttcaacagggggataagcgggagaaattctgtctaataccccatagagtctagagggcacatgttttttagactaaagccttggtggttggagatgggcatgcgtgacattaggtagttggcggggcaacggcccaccaagccgacgatgtctaggggagctgagaggctagacccccacactggtactgagacacggaccagactcctacgggaggcagcagtgaggaatattggtcaatggagggaactctgaaccagccatgccgcgtgagggaagacggtcctatgggttgtaaacctcttttgcacgggagcaataagtgtcctgcggggcatgatgagagtaccgtgcgaataagc

SEQ ID NO: 8684 - DNA, 490 bp, unidentified
  misc_feature 1..490: note = Ascusbbf_502853, encodes 16S rRNA
  source 1..490: mol_type = genomic DNA
agagtttgatcctggctcagaacgaacgctggcggcgcgtcttaagcatgcaagtcgaatggcaagataagagcttgctcttatcctagaatggcggactggtgagtaacgcgtgggtgacgtacctcttggatggggatagctactggaaacagtagataataccgaataagctgcatggatttagaggccatgcaggaaagcagcttttgctgcaccgagagagcggcccgcgggctattagcttgttggcggggtaacggcccaccaaggcgacgatagctacccggcctaagagggtgatcgggaacattgggactgagatacggcccagactcctacgggaggcagcagctaagaatattccgcaatggacgaaagtctgacggagcgacgccgcgtggacgaggaaggccggaaggttgtaaagtccttttatgactgaggaataagcagagtgagagaaacgctttgtggtgactgtaggtca

SEQ ID NO: 8685 - DNA, 490 bp, unidentified
  misc_feature 1..490: note = Ascusbbf_212131, encodes 16S rRNA
  source 1..490: mol_type = genomic DNA
agagtttgatcatggctcagagtgaacgctggcggcgtggctaagacatgcaagtcgagcggtcatatgctttcgggcatatgatagcggcaaacgggtgagtaacacgtaagtaacctacccttaagacagggatagcccgatgaaagttggggtaataccggatgaggaccattggtgcatgctaatggatcgaaaggtaaggaagtacgcttaaggaggggcttgcggcctatcagctagttggtggtgtaacggaccaccgaggcgaagacgggtagccggtctgagaggacgaacggccacattggaactgagacacggtccagacatctacggatggcagcagtttcgaattattcacaatgggcgaaagcctgatggtgcgacgtcgcgtggaggaagaaggtctttggattgtaaactcctgtcattagggagcaaagtgcaagtggagagcttgttttgagttaacctaaagaggaagcag

SEQ ID NO: 8686 - DNA, 490 bp, unidentified
  misc_feature 1..490: note = Ascusbbf_400903, encodes 16S rRNA
  source 1..490: mol_type = genomic DNA
agagtttgatcctggctcagattgaacgctggcggcatgctttacacatgcaagtcgaacggtaacagggagcttgctccgctgacgagtggcgaacgggtgagtaatgcatcggaacgtgcctatttgtgggggataacgtagcgaaagttacgctaataccgcatacgccctgagggggaaagcgggggattcgtaagaacctcgcgcaattagagcggccgatgtcggattagctagttggtggggtaaaggctcaccaaggcgacgatccgtagcgggtctgagaggatgatccgccacactgggactgagacacggcccagactcctacgggaggcagcagtggggaattttggacaatgggcgaaagcctgatccagccatgccgcgtgagtgaagaaggccttcgggttgtaaagctctttcagccggaaagaaatcgcgcaggctaatactctgcgtggatgacggtaccggaagaagaagc

SEQ ID NO: 8687 - DNA, 490 bp, unidentified
  misc_feature 1..490: note = Ascusbbf_95498, encodes 16S rRNA
  source 1..490: mol_type = genomic DNA
agagtttgatcctggctcaggacgaacgctggcggcacgcttaacacatgcaagtcgaacggagtaattgagagcttgcttttgattacttagtggcggacgggtgagtaacacgtgagcaacctgcctttgagagtggaatagcttctggaaacggatggtaataccgcataacattacggggccgcatgaccctgtaatcaaagatttatcgctcaaagatgggctcgcgtctgattaggtagttggtgaggtaacggctcaccaagccgacgatcagtagccggactgagaggttgaacggccacattgggactgagacacggcccagactcctacgggaggcagcagtggggaatattgcacaatgggcggaagcctgatgcagcgatgccgcgtggaggaagaaggttttcggattgtaaactcctgatctgagggacgataatgacggtacctcaggagaaagctccggctaactacgtgccag

SEQ ID NO: 8688 - DNA, 490 bp, unidentified
  misc_feature 1..490: note = Ascusbbf_501614, encodes 16S rRNA
  source 1..490: mol_type = genomic DNA
agagtttgatcatggctcaggatgaacgctagcgaaatgcctaacacatgcaagtcgaacggaccttgcgtcgtagtaatacgtagtaaggttagtggcaaacgagcgagtaacgcgtgcttaacctgccccgaagttgggtataactacagagatgtagctaattcccaatatgctcacgatggtgaaatcccaatgggaggaaagatttatcgcttcgggaggggggtgcgtcctatcagatagttggtgaggtaacggcttaccaagtctatgacgggtaaccggtctgagatgatgtccggtcgcgatgggactgagatacggcccatactcctacgggaggcagcagtggggaatcttgcacaatggacgaaagtctgatgcagcaatttcgcgtgaaggatgaagcattacggtgtgtaaacttcttttttggcagaagacgaatgacggtatgtcaagaataagagacggctaactacgtgcc

SEQ ID NO: 8689 - DNA, 490 bp, unidentified
  misc_feature 1..490: note = Ascusbbf_644149, encodes 16S rRNA
  source 1..490: mol_type = genomic DNA
agagtttgatcatggctcaggatgaacgctagctacaggcttaacacatgcaagtcgagcggtccagcaatggatagcggcgaacgggtgagtaacgcgtaagcaatctgccccctgctcgggaatagccgtgccaacgcgcggataataccggatatcgtggggccccgcatagggccttgacaaaagatttatcggcaggggatgagcttgcgtccgattagctagttggcggggcaacggcccaccaaggcgacgatcggtagccggcctgagagggtgatcggccacattgggactgagatacggcccagactcctacgggaggcagcagtagggaatattgcacaatgggggaaaccctgatgcagcaacgccacatgtgggaagaagcatttcggtgtgtaaaccactgtcgtgagggaataaggctatttttcggagtagttgaatgtacctcgagaggaagcaccggcaaacttcgtgccag

SEQ ID NO: 8690 - DNA, 490 bp, unidentified
  misc_feature 1..490: note = Ascusbbf_502229, encodes 16S rRNA
  source 1..490: mol_type = genomic DNA
agagtttgatcatggctcaggatgaacgctggcggcgtgcctaacacatgcaagtcgaacggaaggtaagcgcttcggagacttcggtcaatgtttgcttatctttagtggcggacgggtgagtaacgcgtggataacctgcctcacacagggggataacagttagaaatgactgctaataccgcataagcgcacagtctcgcatgggacagtgtgaaaaaccgaggtggtgtgagatggatccgcgtctgattagccagttggcggggtaacggcccaccaaagcgacgatcagtagccggcctgagagggtgaacggccacattgggactgagacacggcccaaactcctacgggaggcagcagtgggggatattgcacaatgggggaaaccctgatgcagcgacgccgcgtgagtgaagaagtatttcggtatgtaaagctctatcagcagggaagataatgacggtacctgactaagaagcaccgg

SEQ ID NO: 8691 - DNA, 490 bp, unidentified
  misc_feature 1..490: note = Ascusbbf_724524, encodes 16S rRNA
  source 1..490: mol_type = genomic DNA
agagtttgatcatggctcaggacgaacgctggcggcatgcctaatacatgcaagtcgagcgaacagatgaggagcttgctcctctgacgttagcggcggatgggtgagtaacacgtgggcaacctgccctgcagatggggataactccgggaaaccggtgctaataccgaataacccattctctcgcatgagagaatgttaaaagacggcttcggctgtcactgcaggatgggcccgcggcgcattagctagttggtaaggtaacggcttaccaaggccacgatgcgtagccgacctgagagggtgatcggccacactgggactgagacacggcccagactcctacgggaggcagcagtagggaatcttccacaatggacggaagtctgatggagcaatgccgcgtgagcgaagaaggttttcggatcgtaaagctctgttgtgagggaagaacaagtataggagtaactgcctgtaccttgacggtacc

SEQ ID NO: 8692 - DNA, 490 bp, unidentified
  misc_feature 1..490: note = Ascusbbf_182818, encodes 16S rRNA
  source 1..490: mol_type = genomic DNA
agagtttgatcatggctcaggatgaacgctggcggcgtgcttaacacattcaagtcgaacgggaagtcgggagcttgctcctgatggatagtggcggacgggtgagtaacgcgtgagcaacctgccttgatgtggggaataacacagggaaacttgtgctaataccgcataatgtatatgtatcacatggtactgtataccaaagctacggtgcattgagatgggctcgcgttggattagatagttggtggggtaacggcctaccaagtcaacgatccatagccggactgagaggttgaacggccacattggaactgagatacggtccagactcctacgggaggcagcagtgaggaatattgggcaatgggcataagcctgacccagcgacgccgcgtgagggaagaaggtcttcggattgtaaaccttagttatcagggaagaagaaagtgacggtacctgaagagaaagccacggctaactacgtgcc

SEQ ID NO: 8693 - DNA, 490 bp, unidentified
  misc_feature 1..490: note = Ascusbbf_62991, encodes 16S rRNA
  source 1..490: mol_type = genomic DNA
agagtttgatcatggctcaggattaacgctggcggcatgcctaatacatgcaagtcgaacggaatgaatgagtagcttgctacgagttcatttagtggcggacgggtgagtaacgcgtgaacaatctgcctgtgagaggggaataacacttagaaataggtgctaattccgcataacactactttacggcatcgtagagtggtcaaaggtttcgcaagattccgctcacagatgagtttgcgtatcattagctagttggtgaggtaacggcccaccaaggcaacgatggttagccggcctgagagggtgaacggccacattggaactgagaacggttcagactcctacgggaggcagcagtaaggaatattgggcaatgggcgaaagcctgacccagcaatgccgcgtgaaggatgaatgtcttcggattgtaaacttctaagcatggggaaaatagtgatggtacccatagataagtcacggcaaacta

SEQ ID NO: 8694 - DNA, 490 bp, unidentified
  misc_feature 1..490: note = Ascusbbf_1874186, encodes 16S rRNA
  source 1..490: mol_type = genomic DNA
agagtttgatcctggctcaggagaaacgctggcggcgcacataagacatgcaagtcgaacggaactttattgaatgtttacaggatataaagtttagtggcggacgggtgagtaacacgtgagcaacctgcctttaagagggggataacattgagaaatcagtgctaataccgcataaagcatatccaccgcatgatggatataagccaaaggagaaatccgcttaaagatgggctcgcgtctgattagttagttggtggggtaacggcctaccaagacgatgatcagtagccgagctgagaggcacaacggccacattgggactgagatacggcccagactcctacgggaggcagcagtcgggaatattgcacaatgggggaaaccctgatgcagtgacgccgcgtataggaagaaggtctttggattgtaaactattgtcgacagggaagaaaaaaatgacagtacctgtggaggaagccccggcaaa

SEQ ID NO: 8695 - DNA, 490 bp, unidentified
  misc_feature 1..490: note = Ascusbbf_283583, encodes 16S rRNA
  source 1..490: mol_type = genomic DNA
agagtttgatcctggctcaggacgaacgctggcggcacgcctaacacatgcaagtcgaacggagtattttggagcttgctttgaaatacttagtggcggacgggtgagtaacacgtgagcaacctgcctttaagagcggaatagcttctggaaacggatggtaataccgcataacattaccggatcgcatggtctggtaatcaaagatttatcgcttaaagatgggctcgcgtctgattagatagttggtggggtaacggcctaccaagtcgacgatcagtagccggactgagaggttgaacggccacattgggactgagacacggcccagactcctacgggaggcagcagtggggaatattgcacaatgggcggaagcctgatgcagcgatgccgcgtggaggaagaaggttttcggattgtaaactccttttatcagggacgaagaatgacggtacctgaagaaaaagctccggctaactacgtgcca

SEQ ID NO: 8696 - DNA, 490 bp, unidentified
  misc_feature 1..490: note = Ascusbbf_294972, encodes 16S rRNA
  source 1..490: mol_type = genomic DNA
agagtttgatcatggctcaggacgaacgctggcggcgtgcctaacacatgcaagtcgaacggagatataccgaatgaaggtttcgattggattttagtatatcttagtggcggacgggtgagtaacgcgtgagtaacctgccaatgagagtggaataacgttctgaaaagaacgctaataccgcataacatatcgaagccgcatgactttgatatcaaagattttatcgctcattgatggactcgcgtccgattagccagttggcggggtaacggcccaccaaagcgacgatcggtagccggactgagaggttgaacggccacattgggactgagacacggcccagactcctacgggaggcagcagtgggggatattgcgcaatgggggaaaccctgacgcagcaacgccgcgtgaaggaagacggtcttcggattgtaaacttcttttgtcgaggacgaagaaagtgacggtactcgacgaataagctc

SEQ ID NO: 8697 - DNA, 490 bp, unidentified
  misc_feature 1..490: note = Ascusbbf_273807, encodes 16S rRNA
  source 1..490: mol_type = genomic DNA
agagtttgatcatggctcagattgaacgctggcggcaggcctaacacatgcaagtcgagcggcagcgggaccttcgggtcgccggcgagcggcggacgggtgagtaatgcctaggaatctgcctgttagtgggggataacgcggggaaactcgcgctaataccgcatacgtcctacgggagaaagtgggggaccctcgggcctcacgctaacagatgagcctaggtcggattagctagttggtggggtaaaggcccaccaaggcgacgatccgtaactggtctgagaggatgatcagtcacactggaactgagacacggtccagactcctacgggaggcagcagtggggaatattggacaatgggcgaaagcctgatccagccatgccgcgtgtgtgaagaaggtcttcggattgtaaagcactttaagttgggaggaagggcgctcggtgaatacccaggcgtcttgacgttaccgacagaataagcac

SEQ ID NO: 8698 - DNA, 490 bp, unidentified
  misc_feature 1..490: note = Ascusbbf_436698, encodes 16S rRNA
  source 1..490: mol_type = genomic DNA
agagtttgatcctggctcaggatgaacgctagcggcaggcctaacacatgcaagtcgaggggcagcggggtgtagcaatacactgccggcgaccggcgcacgggtgcgtaacgcgtatgcaacctgccccgtacaggggtataacggagagaaatttccactaattccccatgaagtcacgaggtcgcatggccttgtgtctaaagcctcggtggtacgggatgggcatgcgtgacattagctagttggcggggcaacggcccaccaaggcgacgatgtctaggggagctgagaggctaatcccccacactggtactgagacacggaccagactcctacgggaggcagcagtgaggaatattggtcaatggagggaactctgaaccagccatgccgcgtgagggaagaaggccctacgggttgtaaacctcttttgcacgggagtaataagggcggtgcgccgtccgatgagagtaccgtgcgaataagc

SEQ ID NO: 8699 - DNA, 367 bp, unidentified
  misc_feature 1..367: note = Ascusbbf_350906, encodes 16S rRNA
  source 1..367: mol_type = genomic DNA
agagtttgatcatggctcaggacgaacgctggcggcgtgcctaacacatgcaagtcgagcggggatgatggaagagcttgctcggaaatcatcctagcggcggacgggtgagtaacgcgtgagcaacctgtcccagacagggggataccagatggaaacatctgctaataccgcataagaccacggggtcgcatggctctggggtaaaaggagcaatccggtttggggtgggctcgcgtccgattagctggttggtgaggtaacggcccaccaaggcgacgatcggtagccgacctgagagggtgatcggccacattggaactgagacacggtccaaactcctacgggagccagcagccgcggtaat

SEQ ID NO: 8700 - DNA, 490 bp, unidentified
  misc_feature 1..490: note = Ascusbbf_281040, encodes 16S rRNA
  source 1..490: mol_type = genomic DNA
agagtttgatcatggctcaggacgaacgctggcggcgtgcttaaaacatgcaagtcgaacggaaagtttgggagcttgcttctagacttttagtggcaaacgggtgagtaacgcgtgggtaatctgccttatacagggggataacagttggaaacgactgctaataccgcataagaccacaatgtcatgaggacataggggtaaaagggataactggtataagatgagcctgcgtttcattagctagttggtgaggtaacggcccaccaaggcaacgatggatagccggtctgagaggacgaacggccacaatggaactgagacacggtccatactcctacgggaggcagcagttaggaatattgggcaatggaggaaactctgacccagcaacgccgcgtgaaggaagaaggttttcggattgtaaacttctgtattatgagacaaagaaagtgatggtatcataatagaaagctacggcaaactacgt

SEQ ID NO: 8701 - DNA, 490 bp, unidentified
  misc_feature 1..490: note = Ascusbbf_1721409, encodes 16S rRNA
  source 1..490: mol_type = genomic DNA
agagtttgatcctggctcagaacgaacgctggcggcaggcctaacacatgcaagtcgagcgagaaaggggcttcggccctgagtagagcggcgcacgggtgagtaacacgtgaataatctgccccttagaccgggataacagaccgaaaggactgctaataccggataagcccacgtcccaaccggggatgcgggaaaagcacgggaccgcaaggccgtgcgctttgggatgagttcgcgttccattagatagttggtgaggtaatggctcaccaagtcgacgatggatagctggtcttagaggatgatcagccacactggaactgagacacggtccagactcctacgggaggcagcagtggggaatcttgcgcaatgggggaaaccctgacgcagccatgccgcgtgagcgatgaaggccttcgggttgtaaagctccgtctaaggggacgaatggcgctgtgaacaagacacacggcgattgacggta

SEQ ID NO: 8702 - DNA, 490 bp, unidentified
  misc_feature 1..490: note = Ascusbbf_390709, encodes 16S rRNA
  source 1..490: mol_type = genomic DNA
agagtttgatcatggctcaggatgaacgctggcggcgtgcttaacacatgcaagtcgaacgaagcattttggaatgcggcttcggccaaaggaagagatgacttagtggcggacgggtgagtaacgcgtgggtaacctgcctcttactgggggataacagttagaaatgactgctaataccgcataagaccacggtaccgcatggtacaggggtaaaagatttattgataagagatggacccgcgtctgattagttagttggtgaggtaacggcccaccaagaccgcgatcagtagccgacctgagagggtgatcggccacattgggactgagacacggcccaaactcctacgggaggcagcagtggggaatattgcacaatgggggaaaccctgatgcagcgacgccgcgtgagtgaagaagtatttcggtatgtaaagctctttaagcagggaagataatgacggtacctgcagaataagcaccggct

SEQ ID NO: 8703 - DNA, 490 bp, unidentified
  misc_feature 1..490: note = Ascusbbf_1525410, encodes 16S rRNA
  source 1..490: mol_type = genomic DNA
agagtttgatcctggctcaggacgaacgctggcggcgtgcctaacacatgcaagtcgaacgggacttaaattttgaagttttcggatggaaagatttaagtttagtggcggacgggtgagtaacgcgtgagtaacctgcctttcagagggggataacgtactgaaaaggacgctaataccgcataacatattgaagccgcatgactttaatatcaaaggagcaatccgctgaaagatggactcgcgtccgattagctagttggcgggataaaggcccaccaaggcgacgatcggtagccggactgagaggttgaacggccacattgggactgagacacggcccagactcctacgggaggcagcagtgggggatattgcgcaatgggggaaaccctgacgcagcaacgccgcgtgaaggaagacggttttcggattgtaaacttcttttgtcagggacgataatgacggtacctgacgaataagctccggc

SEQ ID NO: 8704 - DNA, 490 bp, unidentified
  misc_feature 1..490: note = Ascusbbf_503843, encodes 16S rRNA
  source 1..490: mol_type = genomic DNA
agagtttgatcatggctcaggacgaacgctggcggcgtgcctaacacatgcaagtcgaacggaagcgtacattagaagttttcggatggaagatatacgttttagtggcggacgggtgagtaacgcgtgagtaacctgcctttcagagggggataacgttttgaaaagaacgctaataccgcataacgtaaaggagtcgcatggcttcattaccaaaggagcaatccgctgagagatggactcgcgtccgattagccggttggcggggtaacggcccaccaaagcaacgatcggtagccggactgagaggttgaacggccacattgggactgagacacggcccagactcctacgggaggcagcagtgggggatattgcgcaatgggggaaaccctgacgcagcaacgccgcgtgaatgaggaaggtcttcggattgtaaaattcttttgtcagggacgaagaagtgacggtacctgacgaataagctccg

SEQ ID NO: 8705 - DNA, 490 bp, unidentified
  misc_feature 1..490: note = Ascusbbf_1796360, encodes 16S rRNA
  source 1..490: mol_type = genomic DNA
agagtttgatcctggctcaggacgaacgctggcggcgtgcttaacacatgcaagtcgaacgatgaagccgaagcttgctttggtggattagtggcgaacgggtgagtaatacgtgagcaacctgccctccgcttcgggataagccctggaaacggggtctaataccggatgtttccttccttccgcatggttggttggggaaaggtgttttctggcgggggatgggctcgcggcctatcagcttgttggtggggtgatggcctaccaaggcgtcgacgggtagccggcctgagagggtgaccggccacattgggactgagatacggcccagactcctacgggaggcagcagtgggggatattgcgcaatgggcggaagcctgacgcagcgacgccgtgtgggggatgaaggctttcgggttgtaaacccctttcggccaggaacaaggcagggtttcctgttgagggtactggcataagaagcgccggct

SEQ ID NO: 8706 - DNA, 490 bp, unidentified
  misc_feature 1..490: note = Ascusbbf_297893, encodes 16S rRNA
  source 1..490: mol_type = genomic DNA
agagtttgatcatggctcaggatgaacgctggcggcgtgcctaacacatgcaagtcgagcgggaatgtccggaatgaaacttcggtcgaatgaagggcaggatagcggcggacgggtgagtaacgcgtaggtaagctgccccttgcacagggatagcctcgggaaactgggattaatacctgataaagcgcagacagcacatgctgactgcgccaaagatttatcggcgagggatgcacctgcgtctgattagttagttggtggggtaacggcccaccaagacagcgatcagtagccgacctgagagggtgatcggccacattggaactgagacacggtccaaactcctacgggaggcagcagtggggaatattgcacaatggagggaactctgatgcagcaacgccgcgtgagcgaagaaggtcttcggatcgtaaagctctgtcctaagggacgagaaaggacggtaccttaggaggaagccccggct

SEQ ID NO: 8707 - DNA, 490 bp, unidentified
  misc_feature 1..490: note = Ascusbbf_141279, encodes 16S rRNA
  source 1..490: mol_type = genomic DNA
agagtttgatcatggctcaggacgaacgctggcggcgtgcctaacacatgcaagtcgaacggaaattgccatcggaagttttcggatggaagaaggcagttttagtggcggacgggtgagtaacgcgtgagtaacctgcctttcagagggggataacgtactgaaaaggacgctaataccgcataacatacagataccgcatggtgactgtatcaaaggagcaatccgctgaaagatggactcgcgtccgattagctagttggcgggataaaggcccaccaaggcgacgatcggtagccggactgagaggttgaacggccacattgggactgagacacggcccagactcctacgggaggcagcagtgggggatattgcgcaatgggggaaaccctgacgcagcaacgccgcgtgaaggaagacggttttcggattgtaaacttcttttgtcagggacgaagaatgacggtacctgacgaataagctccgg

SEQ ID NO: 8708 - DNA, 490 bp, unidentified
  misc_feature 1..490: note = Ascusbbf_1294359, encodes 16S rRNA
  source 1..490: mol_type = genomic DNA
agagtttgatcatggctcaggataaacgctggcggcgcacataagacatgcaagtcgaacggaagtcgtaacttttgaagtggattgaagatttatcagattgaaatggatttagttacaatggctttagtggcggactggtgagtaacacgtaagcaacctgcctattagaggggaataacaatgagaaatcattgctaataccgcataagcttgtaggaccgcatggtctagcaagaaaaggagcaatccgctaatagatgggcttgcggctgattagctagttggtaaggtaacggcttaccaaggcaacgatcagtagccgggctgagaggctctgcggccacattgggactgagatacggcccagactcctacgggaggcagcagtcgggaatattgcgcaatggaggaaactctgacgcagtgacgccgcgtataggaagaaggttttcggattgtaaactattttagacagggaagaaaaatg

SEQ ID NO: 8709 - DNA, 490 bp, unidentified
  misc_feature 1..490: note = Ascusbbf_291509, encodes 16S rRNA
  source 1..490: mol_type = genomic DNA
agagtttgatcatggctcaggacgaacgctggcggcgtgcctaacacatgcaagtcgaacgggacttacgattggaagttttcggatggaaggttgtaagtttagtggcggacgggtgagtaacgcgtgagtaacctgcctttcagagggggataacgtactgaaaaggacgctaataccgcataacgtattgaggtcgcatggcaacaataccaaaggagcaatccgctgaaagatggactcgcgtccgattagctagttggtgagataaaggcccaccaaggcgacgatcggtagccggactgagaggttgaacggccacattgggactgagacacggcccagactcctacgggaggcagcagtgggggatattgcgcaatgggggaaaccctgacgcagcaacgccgcgtgaaggaagacggttttcggattgtaaacttcttttgtcagggacgaacgatgacggtacctgacgaataagctccgg

SEQ ID NO: 8710 - DNA, 490 bp, unidentified
  misc_feature 1..490: note = Ascusbbf_283142, encodes 16S rRNA
  source 1..490: mol_type = genomic DNA
agagtttgatcctggctcagagtgaacgctggcggcgtggctaagacatgcaagtcgggcggttgtgtactttcgggtacgcaatagcggcaaacgggtgagtaacacgtaagtaacctacccttaagactgggatagcccagcgaaagttggggtaataccggatgaggaccatgtgtgcatacacatggatcgaaaggtaaggaagtacgcttaaggaggggcttgcggcctatcagctagttggtggtgtaacggacccccaaggcgaagacgggtagccggtctgagaggacgaacggccacattggaactgagacacggtccagacatctacggatggcagcagtttcgaattattcacaatgggcgaaagcctgatggtgcgacgtcgcgtggaggaagaaggtctttggattgtaaactcctgtcattagggagcaaagtgcgagtggagagcttgttttgagttaacctaaagaggaagcag

SEQ ID NO: 8711 - DNA, 490 bp, unidentified
  misc_feature 1..490: note = Ascusbbf_384209, encodes 16S rRNA
  source 1..490: mol_type = genomic DNA
agagtttgatcatggctcaggatgaacgctagcgacaggcctaacacatgcaagtcgaggggtaacaggggagcttgctcccgctgacgaccggcgcacgggtgagtaacgcgtatgcaacctgcccgtaagagggggataacccggagaaattcggactaacaccgcataacaccatgagagggatcatcctcatgtggttaaatatttatagcttacggatgggcatgcgtatgattagctagttggcagggtaacggcctaccaaggcgacgatcattaggggtcctgagagggaaatcccccacattggtactgagacacggaccaaactcctacgggaggcagcagtgaggaatattggtcaatgggcgagagcctgaaccagccatgtcgcgtgaaggaagaatgtcctatggattgtaaacttcttttgtaggggggtaaagtgagcggtgcgccgcttattgcaagtaccctacgaataagc

SEQ ID NO: 8712 - DNA, 490 bp, unidentified
  misc_feature 1..490: note = Ascusbbf_190470, encodes 16S rRNA
  source 1..490: mol_type = genomic DNA
agagtttgatcatggctcaggatgaacgctggcggcgtgcctaacacatgcaagtcgaacggagagtcattcttcggaagggctcttagtggcggacgggtgagtaacgcgtgggtaacctgccttacacagggggacaacagttggaaacgactgctaataccgcataagcccacggtaccgcatggtactgtgagaaaagatttatcagtgtaagatgggcccgcgtctgattagttagttggcggggtaacggcccaccaagacgacgatcagtagccgacctgagagggtgatcggccacattgggactgagacacggcccaaactcctacgggaggcagcagtggggaatattgcgcaatggggggaaccctgacgcagcaacgccgcgtgagtgaagaagtatttcggtatgtaaagctctatcagcagggaagaagatgacggtacctgcagaagaagtcccggctaactacgtgccagcagc

SEQ ID NO: 8713 - DNA, 490 bp, unidentified
  misc_feature 1..490: note = Ascusbbf_1516809, encodes 16S rRNA
  source 1..490: mol_type = genomic DNA
agagtttgatcatggctcaggatgaacgctggcggcgtgcctaatacatgcaagtcggacgcactttcgttaaatgaattagagatgcttgcatcgaagatgattttaaccataaagtgagtggcgaacgggtgagtaacacgtgggtaacctgcccagaagcgggggataacacctggaaacagatgctaataccgcataataacgaaaaccgcatggttttcgtttaaaagatggcttcggctatcacttctggatggacccgcggcgtattagctagttggtgagataatggctcaccaaggcagtgatacgtagccgacctgagagggtaatcggccacattgggactgagacacggcccagactcctacgggaggcagcagtagggaatcttccacaatggacgcaagtctgatggagcaacgccgcgtgagtgatgaaggctttcgggtcgtaaaactctgttgttggagaagaacgtgtgtga

SEQ ID NO: 8714 - DNA, 490 bp, unidentified
  misc_feature 1..490: note = Ascusbbf_1784610, encodes 16S rRNA
  source 1..490: mol_type = genomic DNA
agagtttgatcctggctcaggatgaacgctagctacaggcttaacacatgcaagtcgagcggaatgctttcgggcatttagcggcagacgggtgagtaacacgtatccaacctttcccttactcgggtatagcctcgggaaactgagagtaatccccgatgcagtgtacgaacagcattatttgcacactaaagattcatcggtaaggggtggggatgcgttccattaggtagtaggcggggcaacggcccacctagccgatgatggataggggttctgagaggaaggtcccccacattggaactgcgacacggtccaaactcctacgggaggcagcagtgaggaatattggtcaatggacgtgagtctgaaccagccaagtagcgtgcaggatgacggccctatgggttgtaaactgcttttatgcggggataaagtgcgccacgtgtggcgttttgtaggtaccgcatgaataaggaccggctaattc

SEQ ID NO: 8715 - DNA, 362 bp, unidentified
  misc_feature 1..362: note = Ascusbbf_441678, encodes 16S rRNA
  source 1..362: mol_type = genomic DNA
agagtttgatcatggctcagaacgaacgctggcggcgcgtcttaagcatgcaagtcgagcggtaagttgtagcttgctacaacctagagcggcggactggtgagtaacgcgtgggtgacgtacccttttgacggggatagcctgtggaaacacagggtaataccggataagttcggatgtgtcagaggcattcgaagaaaggttcttttgaaccgcgaaaggagcggcccgcgtgctgttagttagttggcggggtaacggcccaccaagacgacgatagctacccggcctaagagggtgaacgggcacattgggactgagatacggcccagactcctacgggagccagcagccgcggtaat

SEQ ID NO: 8716 - DNA, 490 bp, unidentified
  misc_feature 1..490: note = Ascusbbf_720604, encodes 16S rRNA
  source 1..490: mol_type = genomic DNA
agagtttgatcatggctcagaacgaacgctggcggcgtgcttaacacatgcaagtcgagcgagaaagggcttcggcctgagtacagcggcgaacgggtgcgtaacacgtggataatctaccttcaggctcggaataaccttccgaaaggagggctaatgccgaataagctcacgggtcctttgggacctgcgggaaaaggtggcctctgcttgcaagctatcacctgaagatgagtccgcggcccatcagctagttggcggggtaatggcccaccaaggctacgacgggtagctggtctgagaggacgatcagccacactgggactgagacacggcccagactcctacgggaggcagcagtggggaatcttgcgcaatgggcgaaagcctgacgcagcaacgccgcgtgagcgatgaaggtctttggatcgtaaagctctttcggcagggaagaaacgcccggtggccaatacccatcgggtttgacggt

SEQ ID NO: 8717 - DNA, 490 bp, unidentified
  misc_feature 1..490: note = Ascusbbf_241448, encodes 16S rRNA
  source 1..490: mol_type = genomic DNA
agagtttgatcctggctcaggatgaacgctggcggcgtgcttaacacatgcaagtcgaacggacttgctccgctgtaagatgaagtgcttgcatcgattcttacttggaacaagttagtggcggacgggtgagtaacgcgtggggaacctgcctgtatctgggggataacagttagaaatgactgctaataccgcataagcgcacgagaccgcatggtcctgtgtgaaaaactgaggtggatacagatggacccgcgttggattagccagttggtggggtaacggcctaccaaagcgacgatccatagccggcctgagagggcgaccggccacattgggactgagacacggcccaaactcctacgggaggcagcagtggggaatattgcacaatgggggaaaccctgatgcagcgacgccgcgtgagcgaagaagtatttcggtatgtaaagctctatcagcagggaagaaaatgacggtacctgactaa

SEQ ID NO: 8718 - DNA, 490 bp, unidentified
  misc_feature 1..490: note = Ascusbbf_1877734, encodes 16S rRNA
  source 1..490: mol_type = genomic DNA
agagtttgatcatggctcagaacgaacgctggcggcgcgtcttaagcatgcaagtcgagcgggaatacctagcttgctaggtatgagagcggcggactggtgagtaacgcgtgggtgacgtaccctatggatggggatagctactagaaatagtagataataccgaataagctgcatgatgtcagaggtcatgcaggaaaggagcatatgcttcgccaaaggatcggcccgcgagctattagcttgttggcggggtaacggcccaccaaggcgacgatagctacccggcctaagagggtgatcgggcacattgggactgagatacggcccagactcctacgggaggcagcagctaagaatattccgcaatggacgaaagtctgacggagcgacgccgcgtggacgaggaaggtcggaagattgtaaagtccttttatatgtggagaataagcaggggagtggaaagcccttgtggtgactgtagcatatg

SEQ ID NO: 8719 - DNA, 490 bp, unidentified
  misc_feature 1..490: note = Ascusbbf_220751, encodes 16S rRNA
  source 1..490: mol_type = genomic DNA
agagtttgatcatggctcaggatgaacgctggcggcgtgcctaacacatgcaagtcgaacgaagcgcactccttcgggggtgtgactgagtggcggacgggtgagtaacgcgtgggtaacctgccctctgcagggggacaacagttagaaatgactgctaataccgcatgagcgcacagtaaggcatcttacggtgtgaaaagcaattacggcagaggatgggcccgcgtctgattagctggttggcagggtaaaggcctaccaaggcgacgatcagtagccggtctgagaggatgaacggccacattggaactgagacacggtccaaactcctacgggaggcagcagtgagggatattgcacaatggggggaaccctgatgcagcaacgccgcgtgggtgaagaagtatttcgatatgtaaagccctatcagcagggaagatgatgacggtacctgactaagaagctccggctaaatacgtgccagcag

SEQ ID NO: 8720 - DNA, 490 bp, unidentified
  misc_feature 1..490: note = Ascusbbf_189679, encodes 16S rRNA
  source 1..490: mol_type = genomic DNA
agagtttgatcatggctcaggacgaacgctggcggcgtgcctaacacatgcaagtcgaacggactgattcccttcggggatgaaagttagtggcggacgggtgagtaacgcgtgagcaacctgcctttcagagggggataacgttcggaaacgaacgctaataccgcataacatatggaagtcgcatggctatcatatcaaaggagcaatccgctgaaagatgggctcgcgtctgattagatagttggtggggtaacggcctaccaagtcgacgatcagtagccggactgagaggttgatcggccacattgggactgagacacggcccagactcctgcgggaggcagcagtgggggatattgcacaatgggcgcaagcctgatgcagcaacgccgcgtgagtgatgaaggtcttcggattgtaaaactctgtccttggtgacgaaacaaatgacggtagccgaggaggaagccacggctaactacgtgcc

SEQ ID NO: 8721 - DNA, 490 bp, unidentified
  misc_feature 1..490: note = Ascusbbf_240423, encodes 16S rRNA
  source 1..490: mol_type = genomic DNA
agagtttgatcctggctcagaacgaacgctggcggcgtgcctaacacatgcaagtcgagcgcgaataggggcaacccttagtagagcggcgcacgggtgcgtaacacgtggataatctgcctgagtgctcgggataaccagtcgaaagattggctaataccggataagcccacggtttcttcggagactgagggaaaaggtggcctctgcatgcaagctatcacattcagatgagtccgcggcccatcagctagttggcggggtaatggcccaccaaggcgacgacgggtagctggtctgagaggacgatcagccacactggaactgagacacggtccagactcctacgggaggcagcagtggggaattttgcgcaatgggcgaaagcctgacgcagcaacgccgcgtgtgtgatgaaggtctttggattgtaaagcactttcgaccgggaagaaaccctgttggctaacatccaacagcttgacggtac

SEQ ID NO: 8722 - DNA, 490 bp, unidentified
  misc_feature 1..490: note = Ascusbbf_414069, encodes 16S rRNA
  source 1..490: mol_type = genomic DNA
agagtttgatcctggctcaggatgaacgctagcgggaggcctaatacatgcaagtcgaggggtaacagggtcttcggaccgctgacgaccggcgcacgggtgagtaacgcgtacacaacctacctttaagagggggatagcctttggaaacgaagattaataccccatggtattatgatcctgcatgggattataattaaagctgaggcgcttaaagatgggtgtgcgtcccattagctagttggtgaggtaacggctcaccaaggcgatgatgggtagggggcgtgagagcgtggccccccacacgggtactgagacacggacccgactcctacgggaggcagcagtaaggaatattggacaatgggcgcaagcctgatccagccatcccgcgtgcaggatgactgccctatgggttgtaaactgcttttattagggaagaaacccctggatttatccggggctgccggtacctaatgaataagcaccg

SEQ ID NO: 8723 - DNA, 490 bp, unidentified
  misc_feature 1..490: note = Ascusbbf_745190, encodes 16S rRNA
  source 1..490: mol_type = genomic DNA
agagtttgatcatggctcaggacgaacgctggcggcgcgcctaacacatgcaagtcgaacggagagtgggttttgattctttcgggatgatgaattcatttcttagtggcggacgggtgagtaacacgtgagcaacctgccttgcagagcgggataacggttggaaacgatcgctaataccgcataacatatgattgtcgcatggctatcatatcaaagatttatcgctgcaggatgggctcgcgtctgattagatagttggtggggtaatggctcaccaagtcgacgatcagtagccggactgagaggttgaacggccacattgggactgagacacggcccagactcctacgggaggcagcagtgggggatattgcacaatggggggaaccctgatgcagcgacgccgcgtgagggaagaaggttttcggattgtaaacctctgtctttggggacgataatgacggtacccaaggaggaagctctggct

SEQ ID NO: 8724 - DNA, 490 bp, unidentified
  misc_feature 1..490: note = Ascusbbf_406952, encodes 16S rRNA
  source 1..490: mol_type = genomic DNA
agagtttgatcatggctcagattgaacgctggcggcaggcctaacacatgcaagtcgagcggggttttcggacctagcggcggacgggtgagtaatgtatagggagctgcccgacagagggggataccagttggaaacggctgttaataccgcataacgtctacggaccaaagtatgggaccttcgggccatatgctgtcggatgcacctatatgggattagctagttggtggggtaatggctcaccaaggcgacgatccctagctggtttgagaggatgatcagccacactggaactgagacacggtccagactcctacgggaggcagcagtggggaatattggacaatgggcgcaagcctgatccagccatgccgcgtgtgtgaagaaggccttcgggttgtaaagcactttcagcgaggaggaagggtgttgttttaatagagcagcattttgacgttactcgcagaagaagcaccggctaactccg

SEQ ID NO: 8725 - DNA, 490 bp, unidentified
  misc_feature 1..490: note = Ascusbbf_1381043, encodes 16S rRNA
  source 1..490: mol_type = genomic DNA
agagtttgatcatggctcaggacgaacgctggcggcgtgcttaacacatgcaagtcgagcggaaaggcccttcggggtactcgagcggcgaacgggtgagtaacacgtgagtaacctgccctaggctttgggataaccccgggaaaccggggctaataccggatatgacctggtgccgcatggtgttgggtggaaagttttttcggcctgggatgggctcgcggcctatcagcttgttggtggggtgatggcctaccaaggcgatgacgggtagccggcctgagagggcgaccggccacactgggactgggacacggcccagactcctacgggaggcagcagtgggaatattgcacaatgggcggaagcctgatgcagcgacgccgtgtgagggatgaaggccttcgggttgtaaacctctttcagcagggacgaagcgtgagtgacggtacctgcagaagaagcgccggccaactacgtgccagcagcc

SEQ ID NO: 8726 - DNA, 490 bp, unidentified
  misc_feature 1..490: note = Ascusbbf_1885519, encodes 16S rRNA
  source 1..490: mol_type = genomic DNA
agagtttgatcctggctcaggacgaacgctggcggcgtgcctaacacatgcaagtcgagcggggatatcggaagagcttgctcggaagatattccagcggcggacgggtgagaaacgcgtgagcaacctgtccctgacagggggataccagatggaaacatctgctaataccgcataagaccacagccccgcatgagggagtggtaaaaggagagatccggtttggggtgggctcgcgtccgattagctggttggtgaggtaacggcccaccaaggcgacgatcggtagccgacctgagagggtgatcggccacattggaactgagacacggtccaaactcctacgggaggcagcagtggggaatattgggcaatgggcgaaagcctgacccagcaacgccgcgtgagggaagaaggttttcggattgtaaacctctgtcctaagtgacgaaggaagtgacggtagcttaggaggaagccccggctaact

SEQ ID NO: 8727 - DNA, 490 bp, unidentified
  misc_feature 1..490: note = Ascusbbf_500173, encodes 16S rRNA
  source 1..490: mol_type = genomic DNA
agagtttgatcctggctcaggacgaacgctggcggcgtgcctaatacatgcaagtcgagcggactaataggttcttcggaacctgttggttagcggcggacgggtgagtaacacgtaggcaacctgcccgtaagactgggataactaccggaaacggtagctaataccggatacgcaagttcctcgcatgggggatttgggaaaggcggagcaatctgtcacttacggatgggcctgcggcgcattagctagttggtggggtaacggctcaccaaggcgacgatgcgtagccgacctgagagggtgaacggccacactgggactgagacacggcccagactcctacgggaggcagcagtagggaatcttccgcaatggacgaaagtctgacggagcaacgccgcgtgagtgaagaaggttttcggatcgtaaagctctgttgccagggaagaacgtcctctagagtaactgctaggggagtgacggtacc

SEQ ID NO: 8728 - DNA, 490 bp, unidentified
  misc_feature 1..490: note = Ascusbbf_392912, encodes 16S rRNA
  source 1..490: mol_type = genomic DNA
agagtttgatcatggctcagaacgaacgctggcggcgcgtcttaagcatgcaagtcgaacggcaagatggagcttgctccatcctagagtggcggactggtgagtaacacgtgggtgacatgcctttcagttggggatagctactagaaatagtagataataccgaatacggtggcatatcttggaagtatgccaagaaaggagctaaggctccgctgagagattggcccgcggcccattagctagttggtgaggtaaaggcccaccaaggcaatgatgggtatccggcctgagagggtgatcggacacattgggactgagatacggcccagactcctacgggaggcagcagctaagaatattccgcaatggacgaaagtctgacggagcgacgccgcgtggatgatgaaggccgaaaggttgtaaaatccttttggattggaagaagaagcagtgtagggaatgacattgtggtgacggtacaatctga

SEQ ID NO: 8729 - DNA, 490 bp, unidentified
  misc_feature 1..490: note = Ascusbbf_237297, encodes 16S rRNA
  source 1..490: mol_type = genomic DNA
agagtttgatcatggctcaggatgaacgctggcggcgtgcttaacacatgcaagtcgaacggacttaaggcaccgaagcggatttagcttgctattgaagcttcaccgttttaagttagtggcggacgggtgagtaacgcgtgggcaacctgcctttatccgggggataacagttagaaatgactgctaataccgcataagcgcacagcatcgcatgatgcagtgtgaaaaactccggtggatagagatggacccgcgttagattagccagttggcggggtaacggcccaccaaagcgacgatctatagccggcctgagagggcgaccggccacattgggactgagacacggcccaaactcctacgggaggcagcagtggggaatattgcacaatgggggaaaccctgatgcagcgacgccgcgtgagtgaagaagtatttcggtatgtaaagctctatcagcagggaagaaaaaggacggtacctgcac

SEQ ID NO: 8730 - DNA, 490 bp, unidentified
  misc_feature 1..490: note = Ascusbbf_269917, encodes 16S rRNA
  source 1..490: mol_type = genomic DNA
agagtttgatcctggctcaggacgaacgctggcggcgtgcctaacacatgcaagtcgaacgaagcttttgatttcggttgagagcttagtggcggacgggtgagtaacgcgtgagtaacctgccttacagagggggataacgtctggaaacggacgctaataccgcatgacatttctttatcacatggtagagaaatcaaaggagcaatccgctgtaagatggactcgcgtccgattagctagatggtgagataacagcccaccatggcgacgatcggtagccggactgagaggttgaacggccacattgggactgagacacggcccagactcctacgggaggcagcagtgggggatattgcacaatggaggaaactctgatgcagcaacgccgcgtgaaggatgaaggtcttcggattgtaaacttttgtacttggggacgataatgacggtacccaagcagcaagctccggctaactacgtgccagca

SEQ ID NO: 8731 - DNA, 490 bp, unidentified
  misc_feature 1..490: note = Ascusbbf_305548, encodes 16S rRNA
  source 1..490: mol_type = genomic DNA
agagtttgatcatggctcaggacgaacgctggcggcgtgcttaatacatgcaagtcgaacgaaatcaaattgtagcttgctatgatttgatttagtggcggacgggtgagtaacgcgtgaataatctacctttcacagggggataacaagtagaaatatttgctaataccgcatatgaccacagtttggcatcaaacaggggtgaaagatttttcggtgaaagatgagttcgcgtatcattagttagttggtggggtaatggcctaccaagactacgatggttagccgacctgagagggtgatcggccacattggaactgagatacggtccagactcctacgggaggcagcagtaaggaatattgggcaatggaggcaactctgacccagcaacgccgcgtgaaggaagaaggtcttcggattgtaaacttctgttattagggaagaagatagtgacggtacctaatgagtaagccccggctaactacgt

SEQ ID NO: 8732 - DNA, 486 bp, unidentified
  misc_feature 1..486: note = Ascusbbf_344803, encodes 16S rRNA
  source 1..486: mol_type = genomic DNA
agagttgatcctggctcaggatgaacgctggcggcgtgcctaacacatgcaagtcgaacggacccttcggggttagtggcgcacgggtgaggaacacgtagcttacctgccctttacactgagataactctgcgaaagcagagctaatatcggataagctcacggggaacagtattcttgtgagaaaagctccggcggtaaaggagggggctgcggcccatcagctagttggtgaggtaatggctcaccaaggcgacgacgggtaggggacctgagagggtgaccccccacactgggactgagacacggcccagactcctacgggaggcagcagtgaggaatattgctcaatgggcgaaagcctgaagcagcgacgccgcgtggacgatgaaggtcttcggatcgtaaagtccttttctgtgtgacgaggaaggacggtagcacaggaataagtgtcggctaactacgtgccagcagccgcggtat

SEQ ID NO: 8733 - DNA, 490 bp, unidentified
  misc_feature 1..490: note = Ascusbbf_1501886, encodes 16S rRNA
  source 1..490: mol_type = genomic DNA
agagtttgatcctggctcagagcgaacgttagcggcgcgcctaacacatgcaagtcgcacgcgaaagggggcaaccctgagtaaagtggcgcacgggtgcgtaacacgtagataacctgccctctgaagggggataacgttccgaaaggagcgctaataccgcgtaacgctgcgagtgctacggcgcttgcagacaaaggctgggaccggcaacggccagtcgtcagaggaggggtctgcggcccatcagctagttggcgaggtaatggctcaccaaggcaaagacgggtagctggtctgagaggatgatcagccacactggtactggaacacggaccagactcctacgggaggcagcagtggggaatcttggtcaatgggcgcaagcctgaaccagcgacgccgcgtgagtgatgaaggccttcgggttgtaaagctctgtggggagggacgaaagaactcggtcgaataggccgagcgttgacggtac

SEQ ID NO: 8734 - DNA, 490 bp, unidentified
  misc_feature 1..490: note = Ascusbbf_1885587, encodes 16S rRNA
  source 1..490: mol_type = genomic DNA
agagtttgatcatggctcaggacgaacgctggcggcgtgcttaacacatgcaagtggagcgacgaaccagggcttgccctggggcagagccgcgaacgggtgagtaacacgtgggtaacctgccctgatgattgggacaacccggggaaactcgggctaataccaaatgtgctcttcgactctaaggtcgtcgaggaaaggtagcttcggcttccgcatcaggatgggcccgcggcccattagcttgttggtgaggtaacggctcaccaaggctgcgatgggtagctggtctgagaggacgatcagccacactgggactgagacacggcccagactcctacgggaggcagcagtggggaatcttgcgcaatgcgcgaaagcgtgacgcagcaacgccgcgtggaggaagacggtcttcggattgtaaactccttttcagttgggacgaagcttcggcggtgaatagccgttcggagtgacggtaccttca

SEQ ID NO: 8735 - DNA, 490 bp, unidentified
  misc_feature 1..490: note = Ascusbbf_950777, encodes 16S rRNA
  source 1..490: mol_type = genomic DNA
agagtttgatcatggctcaggacgaacgctggcggcatgcctaatacatgcaagtcgagcggacgtttcagagagcttgctctttgaaacgttagcggcggacgggtgagtaacacgtgggcaacctgccctacagatggggataactccgggaaaccggggctaataccgaataaacagttggttcgcatgaaccaactctgaaagacggtttcggctgtcactgtaggatgggcccgcggcgcatcagctagttggtggggtaatggcctaccaaggcgacgatgcgtagccgacctgagagggtgatcggccacactgggactgagacacggcccagactcctacgggaggcagcagtagggaatcttccacaatggacgaaagtctgatggagcaatgccgcgtgagcgaagaaggttttcggatcgtaaagctctgttgtaagggaagaacacgtacgggagtaactgcccgtaccttgacggta

SEQ ID NO: 8736 - DNA, 490 bp, unidentified
  misc_feature 1..490: note = Ascusbbf_1724806, encodes 16S rRNA
  source 1..490: mol_type = genomic DNA
agagtttgatcctggctcaggatgaacgctagctacaggcttaacacatgcaagtcgaggggcatcggggaggtagtttgctatctctgccggcgaccggcgcacgggtgagtaacgcgtatccaacctgccgcatagtcgggcacagccctctgaaaggaggattaatgccggatgtggtcattgtgggacatcccattatgactgaagatatattgctatgcgatggggatgcgtccgattagcttgttggcggggtaacggcccaccaaggcgacgatcggtaggggctctgagaggaggatcccccacactggaactgagacacggtccagactcctacgggaggcagcagtgaggaatattggtcaatggaggcaactctgaaccagccaagtagcgtgagggacgactgccctacgggttgtaaacctcttttgttcgggaataaagtgcgggacgcgtcccgctttgtatgtaccgtacgaat

SEQ ID NO: 8737 - DNA, 490 bp, unidentified
  misc_feature 1..490: note = Ascusbbf_716647, encodes 16S rRNA
  source 1..490: mol_type = genomic DNA
agagtttgatcatggctcaggatgaacgctggcggcgtgcttaacacatgcaagtcgaacgaagctcctagaatgatttcttcggattgacttttaggatgacttagtggcggacgggtgagtaacgcgtgaggaacctgccttgcagtggggaataacagatggaaacgtctgctaataccgcataacacggagagatcgcatgttttcttcgtcaaagatttatcgctgtgagatggcctcgcgtctgattagctggttggcggggtaacggcccaccaaggcgacgatcagtagccggactgagaggttgatcggccacattgggactgagacacggcccagactcctacgggaggcagcagtggggaatattgggcaatgggcgcaagcctgacccagcaacgccgcgtgaaggaagaaggctttcgggttgtaaacttcttttaagtgggacgataatgacggtaccacttgaataagctccggc

SEQ ID NO: 8738 - DNA, 490 bp, unidentified
  misc_feature 1..490: note = Ascusbbf_399293, encodes 16S rRNA
  source 1..490: mol_type = genomic DNA
agagtttgatcctggctcaggacgaacgctggcggcgtgcctaacacatgcaagtcgaacgggacttataggaatgagacttcggtcaaaggaatataagtttagtggcggacgggtgagtaacgcgtgagcaacctgcctttcagagggggacaacagttggaaacgactgctaataccgcataacgtaccgggagggcatccttttggtaccaaagatttatcgctgaaagatgggctcgcgtctgattagatagttggtggggtaacggcctaccaagtcgacgatcagtagccggactgagaggttgaacggccacattgggactgagatacggcccagactcctacgggaggcagcagtggggaatattggtcaatgggggcaaccctgaaccagcaacgccgcgtgaaggaagaaggctttcgggttgtaaacttcttttgtcggggacgaaacaaatgacggtacccggcgaataagccacgg

SEQ ID NO: 8739 - DNA, 490 bp, unidentified
  misc_feature 1..490: note = Ascusbbf_1749413, encodes 16S rRNA
  source 1..490: mol_type = genomic DNA
agagtttgatcatggctcaggataaacgctggcggcgtgcataacacattcaagtcgaacggactgatttgagagcttgctctcgatgaaagttagtggcggacgggtgagtaacgcgtgagcaacctgccttcgtgagggggataacacagagaaatttgtgctaataccgcatgacgcatcgaggctgcatagtcttgatgttaaaggagcaatccgcacgaagatgggctcgcgtctgattagatagttggtgaggtaacggcccaccaagtctgcgatcagtagccggactgagaggttgaacggccacattggaactgagaaacggtccagactcctacgggaggcagcagtggggaatattgggcaatgggcgcaagcctgacccagcgacgccgcgtgagcgaagaaggtcttcggattgtaaaactctgttgacagggaagaagaaagtgacggtacctgtcgaggaagccacggctaacta

SEQ ID NO: 8740 - DNA, 490 bp, unidentified
  misc_feature 1..490: note = Ascusbbf_1326273, encodes 16S rRNA
  source 1..490: mol_type = genomic DNA
agagtttgatcatggctcaggacgaacgctggcggcgcgcctaacacatgcaagtcgaacgaagagtgcgctttgaatccttcgggacgattagctcatttcttagtggcggacgggtgagtaacacgtgagcaacctgccttgcagagcgggataacggttggaaacgatcgctaataccgcataatatatgattgtcgcatggctttcatatcaaagatttatcgctgcaagatgggctcgcgtctgattagattgttggtggggtgatggctcaccaagtcgacgatcagtagccggactgagaggttgaacggccacattgggactgagacacggcccaggctcctacgggaggcagcagtgggggatattgcacaatgggggaaaccctgatgcagcgacgccgcgtgagggaagaaggttttcggattgtaaacctctgtctttggggacgataatgacggtacccaaggaggaagctccggct

SEQ ID NO: 8741 - DNA, 490 bp, unidentified
  misc_feature 1..490: note = Ascusbbf_938661, encodes 16S rRNA
  source 1..490: mol_type = genomic DNA
agagtttgatcctggctcagaatgaacgctggcggcgggtcttaagcatgcaagtcggacggcaagaaagtgcttgcactttcctagagtggcggactggtgaggaacacgttggtgacgtaccctttggatggggatagccggtagaaataccgggtaataccgaataaggtcggtggtcttggaagccaccgaggaaagcggctttggccgcgccgaaggaacggcctgcgtcccatcagcttgttggcggggtaaaagcccaccaaggcaatgacgggtatctggcctgagagggtgagcagacacattgggactgagatacggcccagactcctacgggaggcagcagctaagaatattccacgatgggcgaaagcctgatggagccacgccgcgtggacgatgaaggccggaaggttgtaaagtcctttagcaagtgaggaataagcgggatagggaatgatcccgtggtgactgtagcttgaga

SEQ ID NO: 8742 - DNA, 490 bp, unidentified
  misc_feature 1..490: note = Ascusbbf_477046, encodes 16S rRNA
  source 1..490: mol_type = genomic DNA
agagtttgatcctggctcaggacgaacgctggcggcatgcctaacacatgcaagtcgaacggagtatagagagcttgctttctgtacttagtggcggacgggtgagtaacgcgtgagcaacctgcctttcagtggggaataatattctgaaaagagtactaataccgcataacgtattgttgtcgcatgatgatgataccaaagatttatcgctgagagatgggctcgcgtccgattagccagttggtggggtaacggcctaccaaagctacgatcggtagccggactgagaggttgaacggccacattgggactgagacacggcccagactcctacgggaggcagcagtgggggatattgcgcaatgggggaaaccctgacgcagcaatgccgcgtgaaggatgaaggtcttcggattgtaaacttcttttgtcagggacgaaagatgacggtacctgacgaataagctccggctaactacgtgccagc

SEQ ID NO: 8743 - DNA, 490 bp, unidentified
  misc_feature 1..490: note = Ascusbbf_448037, encodes 16S rRNA
  source 1..490: mol_type = genomic DNA
agagtttgatcatggctcagaacgaacgctggcggcatggattaggcatgcaagtcgaacgccggtagcaataccggagtggcgcaagggtgaggaacgcgtgagtgatctgccctcaagttgggaatagctcctggaaacgggaattaataccgaatgtgatcgtattactgcatggtgatatgattaaaggcgcaagtcgcttgaggaggagctcgcgtcccattagctagttggtgaggtaacggcccaccaaggcgatgatgggtagctggtctgagaggacgaccagccacactgggactgagaactgcccagactcctacgggaggctgcagtcgagaattttgggcaatgggcgaaagcctgacccagcaatgccgcgtgcgggatgaaggtcttcggattgtaaaccgctgtcgagagggacgaaaaatgacggtacctctggaggaagccacggctaactacgtgccagcagccgcggtaa

SEQ ID NO: 8744 - DNA, 490 bp, unidentified
  misc_feature 1..490: note = Ascusbbf_474937, encodes 16S rRNA
  source 1..490: mol_type = genomic DNA
agagtttgatcatggctcaggatgaacgctggcggcgtgcttaacacatgcaagtcgaacgagccttgtcggacggatcccttcggggtgaagaccggcgctggcgagtggcggacgggtgagtaacgcgtggggaacctgcctcattccgggggataccagtcggaaacggctgttaataccgcataagcgcacggtgtggcatcacacagtgtgaaaaactccggtggaatgagatggccccgcgtctgattaggcagttggcggggtaacggcccaccaaaccgacgatcagtagccgacctgagagggtgaccggccacattgggactgagacacggcccagactcctacgggaggcagcagtggggaatattgcacaatgggcgcaagcctgatgcagcgacgccgcgtgagcgatgaagtatttcggtatgtaaagctctatcagcagggaagataatgacggtacctgactaagaagctccgg

SEQ ID NO: 8745 - DNA, 490 bp, unidentified
  misc_feature 1..490: note = Ascusbbf_426142, encodes 16S rRNA
  source 1..490: mol_type = genomic DNA
agagtttgatcatggctcaggacgaacgctggcggcgtgcttaacacatgcaagtcgagcggggaacttcggttcccagcggcggacgggtgagtaacacgtgggtaacctgccttacagtggggaatagccttccgaaaggaagattaataccgcataatactcagagatcacatgatctttgagccaaaggaatttatttcgctgtaagatggacccgcggcgcattagcttgttggtgaggtaacggctcaccaaggcttcgatgcgtagccgacctgagagggtgatcggccacattggaactgagacacggtccagactcctacgggaggcagcagtggggaatattgcacaatggaggaaactctgatgcagcaacgccgcgtgagtgatgaaggtcttcggatcgtaaaactctgtcttatgggacgataatgacggtaccataggaggaagccacggctaactacgtgccagcagccgcggt

SEQ ID NO: 8746 - DNA, 490 bp, unidentified
  misc_feature 1..490: note = Ascusbbf_382041, encodes 16S rRNA
  source 1..490: mol_type = genomic DNA
agagtttgatcctggctcaggatgaacgctagcggcaggcctaacacatgcaagtcgaggggcatcacggaaaagcttgcttttctggtggcgaccggcgcacgggtgaggaacacgtatggaacctgcccctgtcaggggaatagcccagggaaacttggattaatgccccatggtaccgggacaccgcatggtgttccggttaaagattcatcggacagggatggccatgcgcaccattagttagttggcagggtaacggcctaccaagacagcgatggttaggggccctgagagggggatcccccacactggtactgagacacggaccagactcctacgggaggcagcagtgaggaatattggacaatggccgagaggctgatccagccatgccgcgtgcaggatgactgccctatgggttgtaaactgcttttatacgggaagaaacccacctacgtgtaggtggctgacggtaccgtaagaataa

SEQ ID NO: 8747 - DNA, 490 bp, unidentified
  misc_feature 1..490: note = Ascusbbf_1002259, encodes 16S rRNA
  source 1..490: mol_type = genomic DNA
agagtttgatcatggctcaggattaacgctggcggcgtgcctaatacatgcaagtcgaatggtagcaataccatggtgaacgggtgagtaacacgtaggtaacctgtccttaagacgaggataaccgatggaaacgtcggataatactggataggaatggataaggcatcttattcattttaaagatttatcacttgaggaggggcctgcggcgcattagctagatggcggggtaaaagcccaccatggcgatgatgcgtagccggactgagaggttgaacggccacaatggaactgagaacggtccatactcctacggggggcagcagtagggaattttcggcaatgggcgcaagcctgaccgagcaacgccgcgtgaacgaagaagtatttcggtatgtaaagttcttttattagggaagaaaaaattaaaattgacggtacctaatgaataagctccggctaactacgtgccagcagccgcggtaat

SEQ ID NO: 8748 - DNA, 490 bp, unidentified
  misc_feature 1..490: note = Ascusbbf_910364, encodes 16S rRNA
  source 1..490: mol_type = genomic DNA
agagtttgatcctggctcaggatgaacgctggcggcgtgcttaacacatgcaagtcgaacggaggacccttgaacgagttttcggacaagtgaaaggaatccttagtggcggacgggtgagtaacgcgtgaggaacctgccttggagaggggaataacacagagaaatttgtgctaataccgcatgaagcaattgtatcgcatgatagagattgccaaagatttatcgctctgagatggcctcgcgtctgattagctggttggcggggtaacggcccaccaaggcgacgatcagtagccggactgagaggttggccggccacattgggactgagacacggcccagactcctacgggaggcagcagtggggaatattgggcaatgggcgcaagcctgacccagcaacgacgcgtgaaggaagaaggctttcgggttgtaaacttctttcatgagggacgaaggaagtgacggtacctcatgaataagctcc

SEQ ID NO: 8749 - DNA, 490 bp, unidentified
  misc_feature 1..490: note = Ascusbbf_308687, encodes 16S rRNA
  source 1..490: mol_type = genomic DNA
agagtttgatcatggctcaggacgaacgctggcggcatgcctaacacatgcaagtcgaacggagataaagagcttgctttttatcttagtggcggacgggtgagtaacgcgtgagcaacctgcctttaagtggggaataatgtactgaaaaggacactaataccgcataaagtatgataaccgcatggttattgtaccaaagatttatcgcttagagatgggctcgcgtccgattagctagttggagaggtaacggctccccaaggcgacgatcggtagccggactgagaggttgaacggccacattgggactgagacacggcccagactcctacgggaggcagcagtgggggatattgcgcaatgggggaaaccctgacgcagcaatgccgcgtgaaggaagaaggtcttcggattgtaaacttcttttgtcagggacgaaaatgacggtacctgacgaataagctccggctaactacgtgccagcagc

SEQ ID NO: 8750 - DNA, 490 bp, unidentified
  misc_feature 1..490: note = Ascusbbf_786075, encodes 16S rRNA
  source 1..490: mol_type = genomic DNA
agagtttgatcctggctcaggacgaacgctggcggcacgcctaacacatgcaagtcgaacggagattatttaacagaattcttcggaaggaagatagataatcttagtggcggacgggtgagtaacgcgtgagtaacctgcctttcagagggggataacgtttggaaacgaacgctaataccgcataacatgtaactatcgcatgatagatatatcaaaggagcaatccgctgaaagatggactcgcgtccaattagctggttggtgaggtaatggctcaccaaggcgacgattggtagccggactgagaggttgaacggccacattgggactgagacacggcccagactcctacgggaggcagcagtgggggatattgcacaatgggggaaaccctgatgcagcgatgccgcgtgagggaagaaggttttcggattgtaaacctctgtcctaggtgaagataatgacggtagcctaggaggaagctacg

SEQ ID NO: 8751 - DNA, 490 bp, unidentified
  misc_feature 1..490: note = Ascusbbf_598515, encodes 16S rRNA
  source 1..490: mol_type = genomic DNA
agagtttgatcatggctcaggacgaacgctggcggcgtgcctaacacatgcaagtcgagcgaagtgagtactacggtacgaacttagcggcggacgggtgagtaacgcgtggacaatctaccctgtagactgggataacacctcgaaaggggtgctaataccggataatgtcgagaagcggcatcgcttttcgaagaaaggagagaatccgctataggaggagtccgcgtcccattagctagttggtgagggtaacggcccaccaaggcgacgatgggtagccggcctgagagggtgaacggccacactggaactgagacacggtccagactcctacgggaggcagcagtggggaatattgtgcaatgggggaaaccctgacacagcaacgccgcgtgagcgaagaaggccttcgggttgtaaagctcaatagtatgggaagataatgacggtaccatacgaaagccccggctaactacgtgccagcagc

SEQ ID NO: 8752 - DNA, 490 bp, unidentified
  misc_feature 1..490: note = Ascusbbf_317771, encodes 16S rRNA
  source 1..490: mol_type = genomic DNA
agagtttgatcatggctcaggatgaacgctggcggcgtgcttaacacattcaagtcgaacggacgatgcgacttcggtcgcaaagttagtggcggacgggtgagtaatgcatgagcaacctgcctttccgcggggaataacacagggaaaccggtgctaataccgcatacgccattcgggtcgcatggtctgaatgggaaaggatttattcacggaaagatgggctcatgtctgattagatagttggtgaggtaacggcccaccaagtctgcgatcagtagccggactgagaggttgaacggccacattggaactgagatacggtccagactcctacgggaggcagcagtggggaatattgggcaatgggggaaaccctgacccagcgacgccgcgtgaaggaagaaggtcttcggattgtaaactttaaatagcagggacgaaaaaaatgacgttacctgcagggaagccacggctaactacgtgccag

SEQ ID NO: 8753 - DNA, 490 bp, unidentified
  misc_feature 1..490: note = Ascusbbf_249132, encodes 16S rRNA
  source 1..490: mol_type = genomic DNA
agagtttgatcatggctcaggacgaacgctggcggcgtgcctaacacatgcaagtcgaacggagcaccgcgctgaacttgagaccagcttgctggaggaaggttcttgcgatgcttagtggcggacgggtgagtaacgcgtgagcaacctgccttgcacagggggataacgtttggaaacgaacgctaataccgcataagaccacacaccggcatcggtgagaggtcaaaggagcaatccggtgcaagatgggctcgcgtccgattaggtagttggtggggtaacggcccaccaagccgacgatcggtagccggactgagaggttgaacggccacattgggactgagacacggcccagactcctacgggaggcagcagtgggggatattgcacaatgggcgcaagcctgatgcagcaacgccgcgtgagggaagaaggtcttcggattgtaaacctctgtccttggtgacgaagaaagtgacggtagccg

SEQ ID NO: 8754 - DNA, 490 bp, unidentified
  misc_feature 1..490: note = Ascusbbf_1808258, encodes 16S rRNA
  source 1..490: mol_type = genomic DNA
agagtttgatcatggctcaggacgaacgctggcggcgcgcttaacacatgcaagtcgaacggagcttgcttttgaaggtccttcgggaacggatgttgcaagcttagtggcggacgggtgagtaacgcgtgagcaacctgcctttcagagggggataacacaacgaaagctgtgctaataccgcatgacattgcgacaccgcatggtgatgcaatcaaaggagcaatccgctgaaagatgggctcgcgtccgattagatagttggcggggtaacggcccaccaagtcgacgatcggtagccggactgagaggttggccggccacattgggactgagacacggcccagactcctacgggaggcagcagtgggggatattgcacaatgggcgaaagcctgatgcagcgacgccgcgtgagggaagaaggtcttcggattgtaaacctttgtcctatgggaagataatgacggtaccatgggaggaagccacg

SEQ ID NO: 8755 - DNA, 490 bp, unidentified
  misc_feature 1..490: note = Ascusbbf_308733, encodes 16S rRNA
  source 1..490: mol_type = genomic DNA
agagtttgatcctggctcaggatgaacgctggcggcgtgcctaacacatgcaagtcgaacgagcagagaggagcttgctccttgaagctagtggcggacgggtgagtaacgcgtggataacctaccctgtacaggggaataacagttagaaatgactgctaatgccgcataagcgcacactgccgcatggcagagtgtgaaaagccgagacggtacaggatggatccgcgtctgattagctagttggtgaggtaacggcccaccaaggcgacgatcagtagccgacttgagagagtgaccggccacattgggactgagacacggcccaaactcctacgggaggcagcagtggggaatattgcacaatgggggaaaccctgatgcagcaacgccgcgtgagtgaagaagtatttcggtatgtaaagctctatcagcagggaagataatgacggtacctgactaagaagccccggctaactacgtgccagca

SEQ ID NO: 8756 - DNA, 490 bp, unidentified
  misc_feature 1..490: note = Ascusbbf_482446, encodes 16S rRNA
  source 1..490: mol_type = genomic DNA
agagtttgatcctggctcagaacgaacgctggcggcgcgtcttaagcatgcaagtcgagcgggattacctagcttgctaggtatgagagcggcggactggtgagtaacgcgtgggtgacgtaccctcctgtctggaatagccggtagaaataccggataatgccggatgaggtccgaggcattggaggccttggaggaaaggagctattgttccgcagggggagcggcccgcgtcccatcagctggttggcggggaaaaggcccaccaaggcgatgacgggtacccggcctcagagggcgaccgggcacattgggactgagatacggcccagactcctacgggaggcagcagctaagaatattccgcaatgggggaaaccctgacggagcgacgccgcgtggacgatgaaggccggaaggttgtaaagtccttttatggcggaggaagaagcgtgcgttggaagcgcgcgtggtgactgtatgccatgaa

SEQ ID NO: 8757 - DNA, 490 bp, unidentified
  misc_feature 1..490: note = Ascusbbf_739639, encodes 16S rRNA
  source 1..490: mol_type = genomic DNA
agagtttgatcatggctcaggatgaacgctggcggcgtgcttaacacatgcaagtcgaacggggatatgagacggatttcttcggagtgaagtttcatatcttagtggcggacgggtgagtaacgcgtgggtaacctgcctatgacagggggacaacagttggaaacgactgctaataccgcataagccgggagaggggcatccctccaccggaaaagatttatcggtcatagatggacccgcgtctgattagcttgttggtgaggtaacggcccaccaaggcgacgatcagtagccgaactgagaggttgaccggccacattgggactgagacacggcccaaactcctacgggaggcagcagtggggaatattgcacaatggggggaaccctgatgcagcgacgccgcgtgagtgacgaagtatttcggtatgtaaagctctatcgatggggaagaaaacgacggtacccaagtaagaagccccggcta

SEQ ID NO: 8758 - DNA, 490 bp, unidentified
  misc_feature 1..490: note = Ascusbbf_1429523, encodes 16S rRNA
  source 1..490: mol_type = genomic DNA
agagtttgatcctggctcaggatgaacgctagctacaggcttaacacatgcaagtcgaacgaacttaacctttagtttactaatggagcggttagtggcggactggtgagtaacacgtaagcaacctgcctatcagaggggaacaacagttagaaatgactgctaataccgcatatgccttgagtaacgcatgttacaaaagggaaaggagcaatccgctgatagatgggcttgcgtctgattagatagttggtggggtaacggcctaccaagtcaacgatcagtagccggactgagaggttgaacggccacattgggactgagatacggcccagactcctacgggaggcagcagtcgggaatattgcgcaatggaggaaactctgacgcagtgacgccgcgtgcaggaagaaggttttcggattgtaaactgctttagacagggaagaacaaggacagtacctgtagaataagctccggctaactacgt

SEQ ID NO: 8759 - DNA, 490 bp, unidentified
  misc_feature 1..490: note = Ascusbbf_834081, encodes 16S rRNA
  source 1..490: mol_type = genomic DNA
agagtttgatcatggctcagattgaacgctggcggcgtgcttcatacatgcaaatcgaacgagaaactcacttcggtgagtggaaagtggcggacgggtgagtaatgtgtagagaatctgccccagagtgggggacaacagagggaaacttctgctaataccccatatgagcgtagttgcgatactattcttgaaagatttattgctctgggatgagtctgcatctgattagctagttggaggtgtaatggaccaccaaggcgacgatcagtagctggtttgagaggatgatcagccacaatgggactgagacacggcccatactcctacgggaggcagcagtagggaattttgcgcaatgggcgaaagcctgacgcagcaacgccgcgtgattgcagacggccttcgggttgtaaagatctgtcagtagggacgaacaatgactgtacctacagaggaagcaccggctaactccgtgccagcagccgcg

SEQ ID NO: 8760 - DNA, 490 bp, unidentified
  misc_feature 1..490: note = Ascusbbf_720246, encodes 16S rRNA
  source 1..490: mol_type = genomic DNA
agagtttgatcctggctcaggatgaacgctagctacaggcttaacacatgcaagtcgaggggcagcatggtggtagcttgctaccaccgatggcgaccggcgcacgggtgagtaacacgtatccaacctgcccatgacccggggatagccctctgaaaggaggattaatacccgatacggtggttgcgggacatcccgctcttaccaaagattcatcggtcacggatggggatgcgtctgattagcttgtcggcggggtaacggcccaccgaggcgacgatcagtaggggttctgagaggaaggtcccccacataggaactgagacacggtcctaactcctacgggaggcagcagtgaggaatattggtcaatggccgcaaggctgaaccagccaagtagcgtgaaggatgactgccctacgggttgtaaacttcttttatgcgggaataaagtgccgtacgcgtacggttttgcatgtaccgcatgaat

SEQ ID NO: 8761 - DNA, 490 bp, unidentified
  misc_feature 1..490: note = Ascusbbf_731513, encodes 16S rRNA
  source 1..490: mol_type = genomic DNA
agagtttgatcctggctcaggacgaacgctggcggcgtgcctaacacatgcaagtcgagcgatgatcggaagatgaggccctcgggcggattcttctgagattagcggcggatgggtgagtaacgcgtgggcaatctgccctccacagggggataacacagggaaacttgtgctaataccgcataacatctttttaaggcatcttgagaagatcaaaggagcgatccggtgaaggaggagcccgcgtctgattagctagttggtgaggtaacggctcaccaaggcgacgatcagtagccgaactgagaggttgatcggccacattgggactgagacacggcccagactcctacgggaggcagcagtggggaatattgcacaatggaggaaactctgatgcagcaacgccgcgtgaaggatgacggccttcgggttgtaaacttctttggcaggggacgaagacagtgacggtaccctgagaacaagccac

SEQ ID NO: 8762 - DNA, 490 bp, unidentified
  misc_feature 1..490: note = Ascusbbf_468211, encodes 16S rRNA
  source 1..490: mol_type = genomic DNA
agagtttgatcatggctcaggacgaacgctggcggcacgcttaacacatgcaagtcgaacgaggtccatggagcttgctccggaagacctagtggcgaacgggtgcgtaacacgtgagaaacctgtcccgaacttgggaataacagtcggaaacgactgctaataccgaatatcttcgtagcgtcgcatggcgcatcgaagaaagcttttgcggtttgggagggtctcgcggcctatcagctagttggtgaggtaacggctcaccaaggcatcgacgggtagctggtctgagaggatgatcagccacactgggactgagacacggcccagactcctacgggaggcagcagtggggaatattgcacaatgggcgcaagcctgatgcagcgatgccgcgtgcgggaagaaggccttagggttgtaaaccgctttcagcagggaagaaactgacggtacctgcagaagaaggagcggccaactacgtgccagc

SEQ ID NO: 8763 - DNA, 490 bp, unidentified
  misc_feature 1..490: note = Ascusbbf_1787298, encodes 16S rRNA
  source 1..490: mol_type = genomic DNA
agagtttgatcatggctcaggatgaacgctagctacaggcttaacacatgcaagtcgaggggcatcacgtggcagcaatgtcatggtggcgaccggcgcacgggtgagtaacgcgtatccgacctggccttcactccgggacagccctccgaaagggggattaatccgggatgtgtggagaagtcgcatggaatctccatgaaagattcatcggtgaaggatggggatgcgtcccattaggtagtcggcggggtaacggcccaccgagcccgcgatgggtaggggtactgagaggtaggtcccccacactggaactgagacacggtccagactcctacgggaggcagcagtgaggaatattggtcaatggggggaaccctgaaccagccaagtagcgtggaggatgacggccctacgggttgtaaactccttttatgcgggggtaatgtacgccacgtgtggtgtattgcaagtaccgcatgaataagca

SEQ ID NO: 8764 - DNA, 490 bp, unidentified
  misc_feature 1..490: note = Ascusbbf_1841847, encodes 16S rRNA
  source 1..490: mol_type = genomic DNA
agagtttgatcatggctcaggacgaacgctggcggcgtgcctaatacatgcaagtcgagcggaccaatggagagcttgctctcctgcggttagcggcggacgggtgagtaacacgtaggcaacctgcctgtacgaccgggataactccgggaaaccggagctaataccggataggatttcagaccgcatggtttggaatggaaagaccctgtgtcacgtacagatgggcctgcggcgcattagctggttggtggggtaacggcctaccaaggcgacgatgcgtagccgacctgagagggtgaacggccacactgggactgagacatggcccagactcctacgggaggcagcagtagggaatcttccgcaatggacgaaagtctgacggagcaacgccgcgtgaacgaagaaggttttcggatcgtaaagttctgttgttagggaagaaccgccgggataacctcccggtctgacggtacctaacgagaaa

SEQ ID NO: 8765 - DNA, 490 bp, unidentified
  misc_feature 1..490: note = Ascusbbf_528889, encodes 16S rRNA
  source 1..490: mol_type = genomic DNA
agagtttgatcatggctcaggatgaacgctagcggcaggcttaacacatgcaagtcgaggggcagcggggatagcaatatccgccggcgaccggcgaaagggtgcgtaacgcgtgagcaacttgcccgtatcagggggataaccgatggaaacgtcgcctaataccccataacaacagggttcgcatggatcttgtttgaaagctctggcggatacggataggctcgcgagacattagctagttggagtggtaacggcacaccaaggcgacgatgtctaggggttctgagaggaaggtcccccacattggaactgagacacggtccaaactcctacgggaggcagcagtgaggaatattggtcaatggacggaagtctgaaccagccatgccgcgtgcaggaataaggccctatgggtcgtaaactgcttttgtggtggagcaataaggtgtacgtgtacaccgatgagagtacatcacgaataagcatc

SEQ ID NO: 8766 - DNA, 490 bp, unidentified
  misc_feature 1..490: note = Ascusbbf_1371561, encodes 16S rRNA
  source 1..490: mol_type = genomic DNA
agagtttgatcctggctcaggatgaacgctagcggcaggcttaacacatgcaagtcgaggggcagcgcggggtagcaatactctggcggcgaccggcggaagggcgcgtaacgcgtgcgcaacttgcccgtcactgggggataggcactggaaacggtgtgtaatactccatcacatatggattcacatggatttatattgaaagattcgttggtgacggatgggctcgcgtaacattaggtcgtcggcggggtaacggcccaccgaggctacgatgatgagaggttctgagaggaaggtcccccacactggaactgagacacggtccaaactcctacgggaggcagcagtgaggaatattggccaatgggcgggagcctgaaccagccatgccgcgtgcaggaataaggccctatgggtcgtaaactgcttttccttgggagcaataagggtcacgagtggccctatgagagtatcaggggaataagca

SEQ ID NO: 8767 - DNA, 490 bp, unidentified
  misc_feature 1..490: note = Ascusbbf_165764, encodes 16S rRNA
  source 1..490: mol_type = genomic DNA
agagtttgatcatggctcaggattaacgctggcggcgtgcctaatacatgcaagtcgaacggacaagatgaatagcttgctaggaatcttgttagtggcggacgggtgagtaacgcgtgagcaatctgcctatgaaagggggataacacttagaaataggtgctaataccgcataatactatttagatgcatgtctttatagtcaaaggagaaatccgatcatagatgagcttgcgtatcattagctagttggtgaggtaacggcccaccaaggcaacgatggttagccggcctgagagggtgaacggccacattggaactgagatacggtccagactcctacgggaggcagcagtaaggaatattgggcaatgggcgaaagcctgacccagcaacgccgcgtgatggaagaaggtcttcggattgtaaacatctaaaagtggggaaaaataagatgatggtacccacagataagtcacggcaaactatg

SEQ ID NO: 8768 - DNA, 488 bp, unidentified
  misc_feature 1..488: note = Ascusbbf_1479115, encodes 16S rRNA
  source 1..488: mol_type = genomic DNA
agagtttgatcctggctcaggatgaacgctggcggcgtgcctaatacatgcaagtcgaacgaagcagcaatgcttagtggcggaagggtgaggaacgcgtgagcaacctgccctcaagttgggaataacagttggaaacgactgctaataccgaatgtggcttttgaaccgcatggtttattggctaaagatttattgcttgaggatgggctcgcgtcccattagctagatggtgaggcaacggctcaccaaggcgatgatgggtagctggtctgagaggatggtcagccacactgggactgagacactgcccagactcctacgggaggctgcagtcgagaatcttgggcaatgcgcgaaagcgtgacccagcaatgccgcgtgcgggatgaaggtcttcggattgtaaaccgctgtcacccgggacgaaagttgactgtaccgggggaggaagccacggctaactacgtgccagcagccgcggtaat

SEQ ID NO: 8769 - DNA, 490 bp, unidentified
  misc_feature 1..490: note = Ascusbbf_736198, encodes 16S rRNA
  source 1..490: mol_type = genomic DNA
agagtttgatcatggctcagaacgaacgctggcggcgcgcctaacacatgcaagtcgagcggttaaacttctttcgggaagatataaagcggcggacgggtgagtagtgcataggtgacctgcctcaaagtgggggatagcctggggaaactcgggttaataccgcgtaagctgcatgggtgaataccatgcagtaaaggcttcggccgctttgagatgggcctatgtttgattagttagttggtgaggtaacggcttaccaagacttcgatcaatagctggtctgagaggatgatcagccacactggaactgagacacggtccagactcctacggggggcagcagtgaggaattttgcgcaatgggggaaaccctgacgcagcgacgccgcgtggaggatgaagtctttcgagatgtaaactcctgtcagtggggaagataatgacggtacccacagaggaagcaccggctaactccgtgccagcagcc

SEQ ID NO: 8770 - DNA, 490 bp, unidentified
  misc_feature 1..490: note = Ascusbbf_748555, encodes 16S rRNA
  source 1..490: mol_type = genomic DNA
agagtttgatcatggctcagattgaacgctggcggcatgccttacacatgcaagtcgaacgcgaaagcggggcaacccgcaagtagagtggcgaacgggtgagtaatacatcggaacgtatccagtagcgggggataacctgtcgaaagataggctaataccgcatacgatctacggatgaaagcgggggaccgcaaggcctcgcactattggagcggccgatgtcggattagctagttggtggggtaaaagcttaccaaggcgacgatccgtagctggtctgagaggacgatcagccacactggaactgagacacggtccagactcctacgggaggcagcagtggggaattttggacaatgggcgcaagcctgatccagccatgccgcgtgagtgaagaaggccttcgggttgtaaagctctttcggtgaagacgaaacggttagcgttaataacgctgactaatgacggtactcacagaagaagcacc

SEQ ID NO: 8771 - DNA, 490 bp, unidentified
  misc_feature 1..490: note = Ascusbbf_750928, encodes 16S rRNA
  source 1..490: mol_type = genomic DNA
agagtttgatcatggctcagaacgaacgctggtagcgtggattaggcatgcaagtcgaacgggatcggggaggtagcaatatttccccgtgagagtggcggaagggcgaggaacacgtgaacaacctgtccatcaggtggggaaaaccgttggaaacgacggctaataccgaatgtggcgtcgcgacacatgtcgcgaacgctagagggggcccgcgagggctctccctgaacgaagggttcgcgcaccatcagctagttggcggggtaacggcccaccaaggcctacggttagctggtctgagaggatgaccagccgcactgggactgagatactgcccagactcctacgggaggctgcagtcgaggatcatttgcaatgggcgaaagcctgacaatgcgacgctgcgtggaggatgaaggccttcgggttgtaaactcctgtcataagggaaaaggagatgacacccaatacgtgtcaaatttgatgg

SEQ ID NO: 8772 - DNA, 490 bp, unidentified
  misc_feature 1..490: note = Ascusbbf_406882, encodes 16S rRNA
  source 1..490: mol_type = genomic DNA
agagtttgatcatggctcaggatgaacgctggcggcgtgcttaacacatgcaagtcgaacgagaaagcaccttcgggtgttagtagagtggcgaacgggtgagtaacacgtgagcaacctgccccccgctccgggataacttggcgaaagccatgctaataccggatactccgctttgagcgcatgctctttgtgggaaagttcaggcggcgggggatgggctcgcggcccattaggtagtaggcggggtaacggcccacctagccgacgatgggtagccgggttgagagaccgaccggccacattgggactgagacacggcccagactcctacgggaggcagcagtggggaattttgcgcaatgggcgaaagcctgacgcagcaacgccgcgtgcgggatgaaggccttcgggttgtaaaccgctttcagcagggaagatactgacggtacctgcagaagaagccccggctaactacgtgccagcagcc

SEQ ID NO: 8773 - DNA, 150 bp, unidentified
  misc_feature 1..150: note = Ascusbbf_300456, encodes 16S rRNA
  source 1..150: mol_type = genomic DNA
agagtttgatcctggctcagtgaccgaatcgccatccataccgccagcagccgcggtaatgccagcagccgcggtaatgccagcagccgcggtaatgccagcagccgcggtaatgccagcagccgcggtaatgccagcagccgcggtaat

SEQ ID NO: 8774 - DNA, 490 bp, unidentified
  misc_feature 1..490: note = Ascusbbf_1811565, encodes 16S rRNA
  source 1..490: mol_type = genomic DNA
agagtttgatcctggctcaggacgaacgctggcggcgtgcctaacacatgcaagtcgaacgagaaatatggaaaggaatccttcggggtaaatagaaatatggacagtggcggacgggcgagtaacgcgtgagtaacctgcccataagcgggggatagccgatggaaacgtcgagtaataccccatgacatacagttgtcgcatggtagctgtatcaaagatttatcgtttatggatggactcgcgtctgattagatagttggtgaggtaacggctcaccaagtcgacgatcagtagccgaactgagaggttgatcggccgcattgggactgagacacggcccagactcctacgggaggcagcagtgggggatattgcgcaatggggggaaccctgacgcagcaacgccgcgtgcaggaagaaggtcttcggattgtaaactgttgtcgcaagggaagaagacagtgacggtaccttgtgagaaagtcac

SEQ ID NO: 8775 - DNA, 490 bp, unidentified
  misc_feature 1..490: note = Ascusbbf_442948, encodes 16S rRNA
  source 1..490: mol_type = genomic DNA
agagtttgatcctggctcagaacgaacgctggcggcgtgcttaacacatgcaagtcgcacgagaaacggggcttcggcccccgagtaaagtggcgaatgggtgagtaacacgtgagtaacatgccttggagcgggggataaccattcgaaaggatggctaataccgcataagaccacaccggcttcggctggagcggtcaaagccttcgggtgctccaagattggctcgcggaccattagctagttggtggggtaatggcccaccaaggcagtgatggatagctggtctgagaggacgatcagccacactgggactgagacacggcccagactcctgcgggaggcagcagtggggaatcttgcgcaatgggcgaaagcctgacgcagcaacgccgcgtgtgtgaagaaggccctcgggtcgtaaagcactgtcagaggggaagaacgcctacattgttaggtttgacggtaccctcaaaggaagcaccgg

SEQ ID NO: 8776 - DNA, 490 bp, unidentified
  misc_feature 1..490: note = Ascusbbf_948826, encodes 16S rRNA
  source 1..490: mol_type = genomic DNA
agagtttgatcctggctcagattgaacgctggcggcatgcttaacacatgcaagtcgaacggcagcatgacttagcttgctaagttgatggcgagtggcgaacgggtgagtaatgcgcaggaacatgccttaaagtgggggacaacttggggaaactcaagctaataccgcataatttccgaggaaaaaagctggggaccttcgggcctggcgctttaagattggcctgcgtccgattagctagttggtaaggtaaaggcttaccaaggcgacgatcggtagctggtctgagaggatgatcagccacactgggactgagacacggcccagactcctacgggaggcagcagtggggaatattggacaatgggggcaaccctgatccagcaatgccgcgtgtgtgaagaaggcctgagggttgtaaagcactttcagtggggaggaggtctaataggttaagagctaattagatggacgttacccacagaag

SEQ ID NO: 8777 - DNA, 490 bp, unidentified
  misc_feature 1..490: note = Ascusbbf_717512, encodes 16S rRNA
  source 1..490: mol_type = genomic DNA
agagtttgatcatggctcagaatgaacgttggcggcatggattaggcatgcaagtcgcgcgatagccagcaatggtgaaagcggcgaaagggacagtaatgtatggattacgtacctccaggaccgggatagctgcgggaaactgcaattaataccggataacatctacggatcaaaggtgtgaatccgcctggagatcggtccatatcctattagcttgttggtgaggtaatggcttaccaaggcaatgatgggtagcgggtgtgagagcatggcccgcgtcactgggactgagacactgcccagacacctacgggtggctgcagtcgagaatcttcggcaatgggcgaaagcctgaccgagcgatgccgcgtgtgggatgaaggccttcgggttgtaaaccactgtcagtggggaggaaataatcggggttacctcggttttgacctatccgcagaggaagtacgggctaagttcgtgccagcagccg

SEQ ID NO: 8778 - DNA, 490 bp, unidentified
  misc_feature 1..490: note = Ascusbbf_1801768, encodes 16S rRNA
  source 1..490: mol_type = genomic DNA
agagtttgatcatggctcaggacgaacgctggcggcgtgcctaatacatgcaagtggaacgcaattgattctcccgtagcttgctacatttgaattgattgagtcgcgaacgggtgagtaacgcgtaggtaacctaccttatagcgggggataactattggaaacgatagctaataccgcataaaagttggcaacacatgttgttaacttaaaaggagcaattgcttcactatgagatggacctgcgttgtattagctagttggtaaggtaacggcttaccaaggcatcgatacatagccgacctgagagggtgatcggccacactgggactgagacacggcccagactcctacgggaggcagcagtagggaatcttcggcaatggggggaaccctgaccgagcaacgccgcgtgagtgaagaaggttttcggatcgtaaagctctgttataagcgaagaacgggagtaagagtggaaagtttactctgt

SEQ ID NO: 8779 - DNA, 490 bp, unidentified
  misc_feature 1..490: note = Ascusbbf_1850301, encodes 16S rRNA
  source 1..490: mol_type = genomic DNA
agagtttgatcctggctcaggacgaacgctggcggtatgcttaagacatgcaagtcgaacgaggtttgttttgtagtaatacaaaacaaatcgagtggcggacgggtgagtaacgcgtgagcaacctgcctctttcatcgggataccaattggaaacgattgctaataccggatatgaccacagcaccgcatggtgcaggggtgaaagggtttactggaaagagatgggctcgcgtctgattagctagttggcggtgcaacggaccaccaaggcgatgatcagtagccgacctgagagggtgatcggccacattgggactgagacacggcccagactcctacgggaggcagcagtcgggaatattgggcaatggaggaaactctgacccagcaataccgcgtgaaggatgaaggtcttcggattgtaaacttctgttataaaggaagaaacaaatgacggtactttataaggaagccccggcaaactatg

SEQ ID NO: 8780 - DNA, 490 bp, unidentified
  misc_feature 1..490: note = Ascusbbf_1139567, encodes 16S rRNA
  source 1..490: mol_type = genomic DNA
agagtttgatcctggctcagaacgaacgctggcggcgcgtcttaagcatgcaagtcgggcggcaagggtgtgcttgcacacccccagagcggcggactggtgagtaacacgtgggtgacgcacccctgggacggggacagcccgtggaaacacagggtaataccggataaggacgcatgggctggagccatgcgtggaaaggagctcaggctccgccgagggagcggcccgcggcccatcagcttgtaggcggtgtaacggaccacctaggctatgacgggtatccggcctgggagggcgatcggacacattgggactgagatacggcccagactcctacgggaggcagcagctaagaatattccgcaatgcgcgaaagcgtgacggagcgacgccgcgtgggcgatgaaggccggaaggttgtaaagccctttggcaggcgaggaataagcgggggagggaatgcccccgcggtgactgtagcctggaa

SEQ ID NO: 8781 - DNA, 490 bp, unidentified
  misc_feature 1..490: note = Ascusbbf_732147, encodes 16S rRNA
  source 1..490: mol_type = genomic DNA
agagtttgatcatggctcaggatgaacgctggcggcgtgcttaacacatgcaagtcgaacggagcctgaccttcgaagccctcgggtggaagaggtttgtgcttagtggcggacgggtgagtaacgcgtgggtaatctgccgtatacagggggataacagttggaaacgactgttaataccgcataagcgcacaggtaggcatctaccggtgtgaaaagctccgacggtatacgatgagcccgcgtctgattagccagttggcagggtaacggcctaccaaagcgacgatcagtagccggcctgagagggtgaacggccacattgggactgagacacggcccaaactcctacgggaggcagcagtggggaatattgcacaatgggggaaaccctgatgcagcgacgccgcgtgagtgatgaagtatttcggtatgtaaagctctatcagcagggaagaaaaagtgacggtacctgactaagaagccccgg

SEQ ID NO: 8782 - DNA, 490 bp, unidentified
  misc_feature 1..490: note = Ascusbbf_949786, encodes 16S rRNA
  source 1..490: mol_type = genomic DNA
agagtttgatcatggctcaggacgaacgctggcggcacgcctaacacatgcaagtcgaacggaggtacgaggagcttgctccttttaccttagtggcggacgggtgagtaacacgtgaggaacctgcttttcagtggggaatagcgtttggaaacgaacgataataccgcataacgtgtgttgaccgcatgatcgatacaccaaaggatttattcgctgagagatggcctcgcgtccgattagatagttggcggggtaacggcccaccaagtcgacgatcggtagccggactgagaggttgaacggccacattgggactgagacacggcccagactcctacgggaggcagcagtgggggatattgcacaatggaggaaactctgatgcagcgatgccgcgtgagggaagacggtcttcggattgtaaacctttgtcttaggggacgaagaatgacggtaccctaggaggaagcaccggctaactacgtgc

SEQ ID NO: 8783 - DNA, 490 bp, unidentified
  misc_feature 1..490: note = Ascusbbf_1811388, encodes 16S rRNA
  source 1..490: mol_type = genomic DNA
agagtttgatcctggctcaggatgaacgctagcggcaggcctaatacatgcaagtcgtacggtaaacggcccttcggggctgtgagagtggcggacgggtgcgtaacgcgtatgcaaccaacccccgacaggcggacagccggtggaaacgccggataatacgccatacggccgcggtgaggcatctcaccgtggtcaaagcctcggcggtcggggacgggcatgcgtgccattagatagtcggcggggtgacggcccaccgagtcgacgatggctaggggatctgagaggacggtcccccacactggtactgagacacggaccagactcctgcgggaggcagcagtaagggatattgggcaatgggggtaaccctgacccagccatgccgcgtgagggaatgaggccctacgggtcgtgaacctcttttattcggggacaagggcgcgcacgcgatgcacgcttgagggtaccgaaggaataagcgtcg

SEQ ID NO: 8784 - DNA, 472 bp, unidentified
  misc_feature 1..472: note = Ascusbbf_1683980, encodes 16S rRNA
  source 1..472: mol_type = genomic DNA
agagtttgatcctggctcagaacgaacgctggcggcaggcctaacacatgcaagtcgagcgcactcttcggagtgagcggcgcacgggtgagtaacgcgtgggaatatgccctggggtcgggaataacggcgggaaactgccgctaatacccggtacgccttgagagggaaaggagcaatccgccctgggagtagcccgcgttggattagctagttggtggggtaaaagcctaccaaggccgcgatccatagctggtctgagaggatgatcagccacactgggactgagacacggcccagactcctacgggaggcagcagtggggaatattggacaatgggggcaaccctgatccagccatgccgcgtgagtgaagaaggccttagggttgtaaagctctttcgacggggacgatgatgacggtacccgtagaagaagccccggctaacttcgtgccagcagccgcggtaat

SEQ ID NO: 8785 - DNA, 490 bp, unidentified
  misc_feature 1..490: note = Ascusbbf_1460924, encodes 16S rRNA
  source 1..490: mol_type = genomic DNA
agagtttgatcatggctcaggacgaacgctggcggcgtgcttaacacatgcaagtcgagcgagagacttcggtctctagcggcggacgggtgagtaacacgtgggtaacctgcctcaaagagggggatagcctcccgaaagggagattaataccgcataatatcataccttcgcatgaaggaatgattaaaggagtaatccactttgagatggacccgcggcgcattagctagttggagaggtaacggctcaccaaggcgacgatgcgtagccgacctgagagggtgatcggccacattggaactgagacacggtccagactcctacgggaggcagcagtggggaatattgcacaatgggcgaaagcctgatgcagcaacgccgcgtgagtgaagaaggtcttcggattgtaaagctctgtcttttgggacgaaaaatgacggtaccaaaggaggaagccacggctaactacgtgccagcagccgcgggt

SEQ ID NO: 8786 - DNA, 490 bp, unidentified
  misc_feature 1..490: note = Ascusbbf_881477, encodes 16S rRNA
  source 1..490: mol_type = genomic DNA
agagttgatcctggctcaggatgaacgctggcggcgtgcttaacacatgcaagtcgaacgagggattacttatgaagttttcggatggattgagtattcccgagtggcggacgggtgagtaacgcgtgggtaacctgccctgtactgggggacaacagagagaaatttctgctaataccgcataacccgctaaggccgcatggcccggacggaaaagatttatcggtacaggatggacccgcgtctgattagcttgttggcggggtaacggcccaccaaggcgacgatcagtagccgaactgagaggttgaccggccacattgggactgagacacggcccagactcctacgggaggcagcagtggggaatattgcacaatggggggaaccctgatgcagcaacgccgcgtgagtgaggaagtatttcggtatgtaaagctctatcagcagggaagagattgacggtacctgactaagaagccccggctaa

SEQ ID NO: 8787 - DNA, 490 bp, unidentified
  misc_feature 1..490: note = Ascusbbf_1802131, encodes 16S rRNA
  source 1..490: mol_type = genomic DNA
agagtttgatcaggctcaggacaaacgctggcggcgtgcataacacatgcaagtcgaacgagaatccagagcgcttcgccttcgggtgaagcgctgtggaggacagtggcgaacgggtgagtaacgcgtaaaaaacctgccttgtacagagggatagcagctggaaacggctattaatacctcatgaagccgatccatcgcatgaaggaacggccaaagatttatcggtatgagatggtcttgcgtctgattagctggttggtggggtaacggcctaccaaggcgacgatcagtagccggcctgagagggtgtacggccacattgggactgagacacggcccaaactcctacgggaggcagcagtggggaattttgcacaatgggggaaaccctgatgcagcgacgccgcgtgaacgaagaaggttttcggattgtaaagttctgtccttggcgaagattgtgacggtagtcaaggaggaagccccggct

SEQ ID NO: 8788 - DNA, 490 bp, unidentified
  misc_feature 1..490: note = Ascusbbf_1463809, encodes 16S rRNA
  source 1..490: mol_type = genomic DNA
agagtttgatcctggctcaggattaacgctggcggcgtgcctaatacatgcaagtcgaatggtagcaataccatggcgaacgggtgagtaacacgtaggtaacctgtcgataagccgaggataaccattggaaacgatggataatactggataggagatttgaaggcatctttaaatctttaaagatttatcacttattgaggggcctgcggcgcattagctagttggtgaggtaaaagcttaccaaggcgatgatgcgtagccggactgagaggttgaacggccacaatggaactgagaacggtccatactcctacgggaggcagcagtagggaattttcggcaatgggcgaaagcctgaccgagcaacgccgcgtgaacgaagaagtatttcggtatgtaaagctcttttattagggacgaaaaaaattaaaattgacggtacctaatgaataagctccggctaactacgtgccagcagccgcggtaa

SEQ ID NO: 8789 - DNA, 490 bp, unidentified
  misc_feature 1..490: note = Ascusbbf_887138, encodes 16S rRNA
  source 1..490: mol_type = genomic DNA
agagtttgatcatggctcaggatgaacgctggcggcgtgcctaatacatgcaagtcgaacggagcaccttggtgctcagtggcgaacgggtgaggagaacataggtaacctgcccctccgagggggacaacagctggaaacggctgctaagaccgcatagacgcattcagggcatcctggatgcgctaaatgaccggatggtcagcggggggatggacctatgcagtattagctagttggcggggcaacggcccaccaaggcgacgatacttagccggcctgagagggcggacggccacactgggactgagacacggcccagactcctacgggaggcagcagtagggaattttcggcaatgggggaaaccctgaccgagcaacgccgcgtgaacgaagaaggccttcgggtcgtaaagttctgttgtacgggaagaacgtcggatggaggaaatgccatgcgagtgacggtaccgaacatagaaagccac

SEQ ID NO: 8790 - DNA, 490 bp, unidentified
  misc_feature 1..490: note = Ascusbbf_1579962, encodes 16S rRNA
  source 1..490: mol_type = genomic DNA
agagtttgatcctggctcaggatgaacgctggcggcgtgcttaacacatgcaagtcgagcgagaaacctgtagatgacgcttcggtagattcagcaggcggaaagcggcggacgggtgagtaacgcgtaggcaacctgcccttagcagagggatagcctcgggaaaccgggatcaaaacctcataatactgatttgtcacatgtcggattagtcaaagatttatcggctaaggatgggcctgcgtctgattagctggttggtgaggtaacggctcaccaaggcaatgatcagtagccgacctgagagggtgatcggccacattggaactgagacacggtccaaactcctacgggaggcagcagtggggaatattgcacaatgggggaaaccctgatgcagcaacgccgcgtgagcgaagaaggcggaatcgtcgtaaagctctgtccttggggaagaaaaaaatgacggtacccttggaggaagccccgg

SEQ ID NO: 8791 - DNA, 490 bp, unidentified
  misc_feature 1..490: note = Ascusbbf_759160, encodes 16S rRNA
  source 1..490: mol_type = genomic DNA
aggagtttgatcatggctcaggatgaacgctggcggcgcgcttaacacatgcaagtcgaacggggtttatgacttcggttataaattcagtggcggacgggtgagtaacacgtggataacttgcctttagtgggggatagctgagagaaatctcaattaataccgcataacgtaatttgttcgcatgaatgagttaataaaggtgaaaatcgctaaaagataggtctgcgtctgattagctagttggggtggtaatggcacaccaaggcgacgatcagtaaccggtttgagagaatgaacggtcacattgggactgagatacggcccagactcctacgggaggcagcagtggggaatattgcgcaatggaggaaactctgacgcagcgacgccgtgtgaaggatgaaggccttcgggttgtaaacttttatcgattgtgaaaaggatggatggtagcaaagtaagaagctccggctaattacgtgccagc

SEQ ID NO: 8792 - DNA, 490 bp, unidentified
  misc_feature 1..490: note = Ascusbbf_1862534, encodes 16S rRNA
  source 1..490: mol_type = genomic DNA
agagtttgatcctggctcaggacgaacgctggcggcgcgcctaacacatgcaagtcgaacggacttacagagcttgctttgtaagttagtggcggacgggtgagtaacacgtgagcaacctgcctttcagagggggacaacagttggaaacgactgctaataccgcataacatcatcgaacggcatcgtttgatgatcaaagatttatcgctgaaagatgggctcgcgtctgattagatagttggtgaggtaacggcccaccaagtcgacgatcagtagccggactgagaggttgaacggccacattgggactgagacacggcccagactcctacgggaggcagcagtgggggatattggacaatggggggaaccctgatccagcgacgccgcgtgagggaagaaggttttcggattgtaaacctctgttgacagggaagaaaatgacagtacctgttcagaaaaccacggctaactacgtgccagcagc

SEQ ID NO: 8793 - DNA, 490 bp, unidentified
  misc_feature 1..490: note = Ascusbbf_1740332, encodes 16S rRNA
  source 1..490: mol_type = genomic DNA
agagtttgatcatggctcagattgaacgctggcggcatgctttacacatgcaagtcgaacggcagcatgggcttcggcctgatggcgagtggcgaacgggtgagtaacacatcggaacatgcctagttgtgggggacaactactcgaaagagtagctaataccgcatgatatctaaggatgaaagcaggggacctttcggggccttgtgcaactagagtggccgatggcagattaggtagttggtgaggtaaaggctcaccaagcctgcgatctgtagctggtctgagaggacgaccagccacactggaactgagacacggtccagactcctacgggaggcagcagtggggaattttggacaatgggcgcaagcctgatccagcaatgccgcgtgcaggatgaaggccttcgggttgtaaactgcttttgtacagaacgaaacgagatttgctaataccaggtcttaatgacggtactgtaagaataagc

SEQ ID NO: 8794 - DNA, 471 bp, unidentified
  misc_feature 1..471: note = Ascusbbf_386766, encodes 16S rRNA
  source 1..471: mol_type = genomic DNA
agagtttgatcatggctcagaacgaacattggcggcaggcctaatacatgcaagtcgagcgaggctacgagccgagcggcggacgggtgagtaatgcatgggaatctacctcgcactgggggataactgtcagaaatgatagctaataccgcatacgccacattgggaaaactccggtggtgtgagatgagcccatgtcagattagctagttggtgaggtaacggctcaccaaggcgacgatctgtagctggtttgagaggatgatcagccacactgggactgagacacggcccagactcctacgggaggcagcagtagggaatattggacaatgggcgaaagcctgatccagccatgccgcgtgagtgatgacggccttcgggttgtaaagctctttcgcaggggaagaatttaatgacggtaccctgataagaagtcccggctaactccgtgccagcagccgcggtaat

SEQ ID NO: 8795 - DNA, 490 bp, unidentified
  misc_feature 1..490: note = Ascusbbf_1413626, encodes 16S rRNA
  source 1..490: mol_type = genomic DNA
agagtttgatcctggctcaggatgaacgctggcggcgtgcttaatacatgcaagtcgaacggggatgtccacccgatgaggccggagtgcttgcacaaaggccgattcaaccggatatcctagtggcggacgggtgagtaacgcgtgggtaacctgccttatacaggggaataacagtcagaaatggctgctaataccgcataagcgcacgaggccgcatggccatgtgtgaaaagatttcatcggtataagatggacccgcgtctgattagcttgttggtggggtaacggcctaccaaggcgacgatcagtagccgacttgagagagtgatcggccacattgggactgagacacggcccagactcctacgggaggcagcagtagggaatattgcacaatgggggaaaccctgatgcagcgacgccgcgtgagtgatgaagtatttcggtatgtaaagctctatcagcagggaagataatgacggtacct

SEQ ID NO: 8796 - DNA, 490 bp, unidentified
  misc_feature 1..490: note = Ascusbbf_732867, encodes 16S rRNA
  source 1..490: mol_type = genomic DNA
agagtttgatcatggctcaggatgaacgctggcggcgtgcctaatacatgcaagtcgaacggacagagcaatctgttagtggcggacgggtgagtaacgcatgaataatctgcccatgagagggggataacacttagaaataggtgctaataccgcataagaccacaacacggcatcgtgaaggggtaaaaggagaaatccgcttatggatgagtttgtgtatcattagctagttggtagtgtaacggactaccaaggcttcgatggttagccggcctgagagggtgaacggccacactggaactgagatacggtccagactcctacgggaggcagcagtaaggaatattgggcaatgggcgaaagcctgacccagcaacgccgcgtgaaggaagaaggtcttcggattgtgaacttctaaaagtggggaaaagaaagtgatggtacccacagataagtcacggcaaactatgtgccagcagccgcggta

SEQ ID NO: 8797 - DNA, 490 bp, unidentified
  misc_feature 1..490: note = Ascusbbf_471782, encodes 16S rRNA
  source 1..490: mol_type = genomic DNA
agagtttgatcatggctcaggatgaacgctggcggcgtgcctaacacatgcaagtcgagcgagaagttgctgacggagatttcggtcaacagaagcgatggatagcggcggacgggtgagtaacgcgtaggtaagctgccctacacacaggaatagcctagggaaacctggattaatgcctgatgacgcggcggagtcacatggctctgtcgccaaagatttatcggtgtgggatgcacctgcgtctgattagctggttggtgaggtaacggcccaccaaggcgacgatcagtagccgacctgagagggtaatcggccacattggaactgagacacggtccaaactcctacgggaggcagcagtgaggaatattgcacaatgggggaaaccctgatgcagcaacgccgcgtgagcgaagaaggtcttcggatcgtaaagctctgtcctaagggacgaagaagtgacggtaccttaggaggaagccccggc

SEQ ID NO: 8798 - DNA, 490 bp, unidentified
  misc_feature 1..490: note = Ascusbbf_1001884, encodes 16S rRNA
  source 1..490: mol_type = genomic DNA
agagtttgatcatggctcagattgaacgctggcggcaggcttaacacatgcaagtcgaacgatgaatatttagcttgctagatatgattagtggcgaacgggtgagtaatatttaggaatctgccttgtagtgggggataacatagggaaacttatgctaataccgcatgatacctaagggtgaaagggtgcttaggcacttgctacgagatgagcctaaactagattagctagttggtggggtaaaggcttaccaaggcgacgatctatagctggtcttagaggatgatcagccacactgggactgagacacggcccagactcctacgggaggcagcagtggggaatattggacaatgggggaaaccctgatccagccatgccgcgtgtgtgaagaaggccttttggttgtaaagcactttaagtggggaggaagaattatgggggataagcccataatgatgacgttacccacagaacaagcaccggc

SEQ ID NO: 8799 - DNA, 488 bp, unidentified
  misc_feature 1..488: note = Ascusbbf_634270, encodes 16S rRNA
  source 1..488: mol_type = genomic DNA
agagtttgatcatggctcagaatgaacgttggcagcgtggattaggcatgcaagtcgagcgacaaggttccttcggggactggaggagcggctaacggggtagtaaagcatcggaacgtaccctttcgtctgggatagccacgggaaactgtgagtaataccggataatctcttcggagcaaaggtccgccgcgtaaggagcggccgatgtgagactaggtagttggtagggtaatggcctaccaagccagagatctctagggggtgtgagagcatggcccccaccactggaactgagacactgtccagacacctacgggtggctgcagtcgagaatcttcggcaatgggcgaaagcctgaccgagcgacgctgcgtgcgggatgaaggcccttgggttgtaaaccgctgtcagaggggatgaaagcgcaagcttgacagagcctcagaggaagcgcgggctaagttcgtgccagcagccgcggtaat

SEQ ID NO: 8800 - DNA, 490 bp, unidentified
  misc_feature 1..490: note = Ascusbbf_1881617, encodes 16S rRNA
  source 1..490: mol_type = genomic DNA
agagtttgatcatggctcaggacgaacgctggcggcacgcctaacacatgcaagtcgaacggaggtaagaggagcttgctccgcttaccttagtggcggacgggtgagtaacacgtgaggaacctgcctttcagtggggaatagcgtttggaaacgaacgataataccgcataatgtatcgggaccgcatgatctggataccaaaggatttattcgctgagagatggcctcgcgtccgattagatagttggcggggtaacggcccaccaagtcgacgatcggtagccggactgagaggttgaacggccacattgggactgagacacggcccagactcctacgggaggcagcagtgggggatattgcacaatggaggaaactctgatgcagcgatgccgcgtgagggaagacggtcttcggattgtaaacctttgtcttaggggacgaattttgacggtaccctaggaggaagcaccggctaactacgtgc

SEQ ID NO: 8801 - DNA, 490 bp, unidentified
  misc_feature 1..490: note = Ascusbbf_1772098, encodes 16S rRNA
  source 1..490: mol_type = genomic DNA
agagtttgatcctggctcaggataaacgctggcggcgcacataagacatgcaagtcgaacggaagtcgttataaatggaaatgaagatttatcggattagaagtttgtaacaatggctttagtggcggactggtgagtaacacgtaagcaacctggctattagaggggaataacaatgagaaatcattgctaataccgcatatgctgtgaatatcgcatgataaaaacaggaaaggagaaatccgctaatagatgggcttgcgactgattagctagttggtgtggtaacggcataccaaggcaacgatcagtagccgaactgagaggttgaacggccacattgggactgagatacggcccagactcctacgggaggcagcagtcgggaatattgcgcaatggaggaaactctgacgcagtgacgccgcgtataggaagaaggttttcggattgtaaactattgtcgttagggaagaagaaggacagtacc

SEQ ID NO: 8802 - DNA, 490 bp, unidentified
  misc_feature 1..490: note = Ascusbbf_1365729, encodes 16S rRNA
  source 1..490: mol_type = genomic DNA
agagtttgatcctggctcaggagaaacgctggcggcgcacataagacatgcaagtcgaacggaactcagacttttgtttacattagtcgaaagtttagtggcggactggtgagtaacacgtgagcaacctgcctttaagaggggaataacagtgagaaatcattgctaataccgcataacgcataaccttcgcatgaaggatatgccaaaggagtaatccgcttaaagatgggctcgcggctgattagttagttggtggggcaacggcctaccaagacagtgatcagtagccgagctgagaggctcaacggccacattgggactgagatacggcccagactcctacgggaggcagcagtcgggaatattgcacaatggaggaaactctgatgcagtgacgccgcgtacaggaagaaggtcctctggattgtaaactgttgtcgaagggaaagataatgacagtacccttggaggaagctccggcaaacta

SEQ ID NO: 8803 - DNA, 490 bp, unidentified
  misc_feature 1..490: note = Ascusbbf_728530, encodes 16S rRNA
  source 1..490: mol_type = genomic DNA
agagtttgatcctggctcagattgaacgctggcggcatgctttacacatgcaagtcgaacggcagcatagggagcttgctccctgatggcgagtggcgaacgggtgagtacaacatcggaacgtgtcctttaatgggggataaccagctgaaaggctggctaataccgcatgagacctgagggtgaaagcgggggaacgagcgatcgtccccgtgttgaaggagcggccgatgaccgattagctagttggcgggataagggcccaccaaggcgacgatcggtagctggtctgagaggacgaccagccacattgggactgagacacggcccaaactcctacgggaggcagcagtggggaattttggacaatgggggcaaccctgatccagccatgccgcgtgcaggaagaaggtcttcggattgtaaactgcttttattcgggacaaaagcttgctgaggacaatttggcaagtatgatggtaccgaagga

SEQ ID NO: 8804 - DNA, 490 bp, unidentified
  misc_feature 1..490: note = Ascusbbf_1753052, encodes 16S rRNA
  source 1..490: mol_type = genomic DNA
agagtttgatcatggctcaggacgaacgctggcggcgtgcttaacacatgcaagtcgaacgatgaagctggtgcttgcactggtggattagtggcgaacgggtgagtaatacgtgagtaacctgcccttgtctttgggataagcctgggaaactgggtctaatactggatattctgcgctggccgcatggttggtgttggaaagggttatggactggatggggatgggctcacggcctatcagtttgttggtggggtgatggcctaccaagactgcgacgggtagccggcctgagagggtggtcggccacattgggactgagatacggcccagactcctacgggaggcagcagtggggaatattgcacaatggacgcaagtctgatgcagtgacgccgcgtgggggatgacggctttcgggttgtaaactccttttaacactgaagaagcttttgtgacggtaggtgttgaataagcgccggctaactac

SEQ ID NO: 8805 - DNA, 490 bp, unidentified
  misc_feature 1..490: note = Ascusbbf_1741082, encodes 16S rRNA
  source 1..490: mol_type = genomic DNA
agagtttgatcatggctcaggacgaacgctggcggcgtgcctaacacatgcaagtcgagcggagggaagggcttcggccctgaacttagcggcggacgggtgagtaacgcgtgagcaacctgtcccagacagggggataccagatggaaacatctgctaataccgcataagaccacggggtcgcatggctccggggtaaaaggaggaatccggtttggggtgggctcgcgtccgattagctggttggtgaggtaacggcccaccaaggcgacgatcggtagccgacctgagagggtgatcggccacattggaactgagacacggtccaaactcctacgggaggcagcagtggggaatattgggcaatgggcgaaagcctgacccagcaacgccgcgtgagggaagaaggttttcggattgtaaacctctgtcctaagtgacgaaggaagtgacggtagcttaggaggaagccccggctaactacgtgcca

SEQ ID NO: 8806 - DNA, 490 bp, unidentified
  misc_feature 1..490: note = Ascusbbf_1786751, encodes 16S rRNA
  source 1..490: mol_type = genomic DNA
agagtttgatcctggctcaggatgaacgctggcggcgtgcctaacacatgcaagtcgaacgaagctctttgaacagaggattcgtccaaagtgatgagatgactgagtggcggacgggtgagtaacgcgtgggcaacctaccccatacagggggatagcagacggaaacgactgataataccgcataagcgcacaggaaggcatcttctggtgtgaaaagcttcgacggtatgggatggacccgcgtctgattagctagttggtgaggtaaaggcccaccaaggcgacgatcagtagccggactgagaggtcggacggccacattgggactgagagacggcccaaactcctacgggaggcagcagtgggggatattgcacaatggggggaaccctgatgcagcgacgccgcgtgagtgaagaagtatttcggtatgtaaagctcaatcaaccgggaagaaaggccccgcaaggggagatgacggtaccgg

SEQ ID NO: 8807 - DNA, 490 bp, unidentified
  misc_feature 1..490: note = Ascusbbf_1796050, encodes 16S rRNA
  source 1..490: mol_type = genomic DNA
agagtttgatcatggctcaggataaacgctagcggcaggcctaacacatgcaagtcgagcggcagcgcggtgtagcaatacattggcggcgagcggcggacgggtgagtaacgcgtatgcaaccttcccaccacacggggatagccgaccgaaaggacgattaacccccgatggcatccttctgaggcatcttggaaagattaaatattcataggtggtggatgggcatgcgtggcattagttagttggcggggcaacggcccaccaagacgatgatgcctatgggttctaaaaggaagatcccacacatcggtactgagacacggaccgaactcctacgggaggcagcagtgaggaatattggacaatgggggcaaccctgatccagccaaaccgcgtgagggaaggaggtcgttaagatcgtaaacctcttttatatgggaataatcgcccccacgaggtgggggtttgaatgtaccatttgaataag

SEQ ID NO: 8808 - DNA, 470 bp, unidentified
  misc_feature 1..470: note = Ascusbbf_1797178, encodes 16S rRNA
  source 1..470: mol_type = genomic DNA
agagtttgatcatggctcagaacgaacgctggcggcaggcttaacacatgcaagtcgaacgcactcttcggagtgagtggcagacgggtgagtaacgcgtgggaacctacctttcggatcggaataacttggggaaactcaagctaagaccggatacgcccttcgggggaatgatttatcgccgagagatgggcccgcgttggattagcttgttggtgaggtaatggctcaccaaggcgacgatccatagttggtctaagaggatgatcagccacactgggactgagacacggcccagactcctacgggaggcagcagtggggaatattggacaatgggggcaaccctgatccagccatgccgcgtgagtgatgaaggccttagggttgtaaagctctttcgccggagaagataatgacggtatccggtaaagaagccccggctaacttcgtgccagcagccgcggtaat

SEQ ID NO: 8809 - DNA, 490 bp, unidentified
  misc_feature 1..490: note = Ascusbbf_1808769, encodes 16S rRNA
  source 1..490: mol_type = genomic DNA
agagtttgatcatggctcaggatggacgctagcggcaggcttaacacatgcaagtcgaggggtaacagggagtggcaacactctgctgacgaccggcgcacgggtgcgtaacgcgtatgcaacctacccttaacaggggtataacggagagaaatttccactaatcccccatattgtcacggattcgcatgtttctgtgacgaaaggttattctggttaaggacgggcatgcgtgacattaggtagttggcggggcaacggcccaccaagccgacgatgtctaggggagctgagaggcttatcccccacactggtactgagacacggaccagactcctacgggaggcagcagtgaggaatattggtcaatgggaggaatcctgaaccagccatgccgcgtgggggaagaaggtcctatgggttgtaaaccccttttacgccggagtaataaggagctggcgagctccgatgagagtacggcgggaataag

SEQ ID NO: 8810 - DNA, 482 bp, unidentified
  misc_feature 1..482: note = Ascusbbf_1834093, encodes 16S rRNA
  source 1..482: mol_type = genomic DNA
agagtttgatcctggctcagagcgaacgctggcggcaggcttaacacatgcaagtcgaaggtgaagtcgggcttcggcccggcggaaactggcggacgggtgagtaacgcgtagggatgtgcctaagggtacggaataaccgttggaaacgacggctaataccgtatacgccccccgggggaaagctccggcgcccttagatcaacctgcgtccgattagcttgttggtgaggtaatggctcaccaaggctccgatcggtagctggtctgagaggatgatcagccacactgggactgagacacggcccagactcctacgggaggcagcagtggggaatattggacaatgggggcaaccctgatccagccatgccgcgtgagtgaagaaggccctagggttgtaaagctctttcagcggggaagatgatgacggtacccgcagaagaagccccggctaactccgtgccagcagccgcggtaat

SEQ ID NO: 8811 - DNA, 490 bp, unidentified
  misc_feature 1..490: note = Ascusbbf_1167738, encodes 16S rRNA
  source 1..490: mol_type = genomic DNA
agagtttgatcctggctcaggatgaacgctggcggcgtgcttaacacatgcaagtcgaacggacttatggcgctgaggcgacttcggtcaaatcttgccataagttagtggcggacgggtgagtgacgcgtgggtaacctgccatatacagggggataacagttagaaatgactgctaataccgcataggcgcacagtgaggcatctcatggtgtgaaaagctccggcggtatatgatggacccgcgtctgattagccagttggcggtgtaacggaccaccaaagcgacgatcagtagccggcctgagagggtgaacggccacattgggactgagacacggcccaaactcctacgggaggcagcagtggggaatattgcacaatgggggaaaccctgatgcagcgacgccgcgtgagtgaagaagtacttcggtacgtaaagctctatcagcagggaagaaaatgacggtacctgactaagaagccccgg

SEQ ID NO: 8812 - DNA, 490 bp, unidentified
  misc_feature 1..490: note = Ascusbbf_1717365, encodes 16S rRNA
  source 1..490: mol_type = genomic DNA
agagtttgatcctggctcaggatgaacgctagcgggaggcctaacacatgcaagccgagcggtagattatcttcggatgattgagagcggcgtacgggtgcggaacacgtgtgtaacctgcccttatcaaggggatagcccggagaaattcggattaataccctataacatattttaaggcatcttaagatattaaaaactacggtggataaggatgggcacgcgcaagattagctagttggtgaggtaacggctcaccaaggcgacgatctttagggggcctgagagggtgatcccccacactgggactgagacacggcccagactcctacgggaggcagcagtgaggaatattggacaatgggtggaagcctgatccagccaacccgcgtgaaggaagacggttctatggattgtaaacttcttttctatggggataaacctaccctcgtgagggtggctgaaggtaacataggaataagcaccggct

SEQ ID NO: 8813 - DNA, 490 bp, unidentified
  misc_feature 1..490: note = Ascusbbf_713545, encodes 16S rRNA
  source 1..490: mol_type = genomic DNA
agagtttgatcctggctcaggactaacgctggcggcatgcctcacacatgcaagtcgagcggtaagcagtagcaatactgcctagagcggcggacgggtgagtaatatatgaacaatctgccctatactacgggataacatacagaaatggatgctaataccgtatatgaccacaccaaggcatcttggaggggtgaaagaaattcggtataggatgagttcatatcccattagctagttggcaggataacagcctaccaaggcaacgatgggtagccgacctgagagggtgtacggccacactggaattgagaaacggtccagactcctacgggaggcagcagtggggaatattgggcaatggaggaaactcttacccagcgatgccgcgtgaaggaagaaggttttcggattgtaaacttctgttataggtgacgaagaatgacggtagcctataaggaagccccggcaaactatgtgccagcagccg

SEQ ID NO: 8814 - DNA, 473 bp, unidentified
  misc_feature 1..473: note = Ascusbbf_1432019, encodes 16S rRNA
  source 1..473: mol_type = genomic DNA
agagtttgatcatggctcagaacgaacgctggcggcatgcctaacacatgcaagtcgaacgatggcttcggccatagtggcgcacgggtgagtaacgcgtggggatctgcccagcagtggggaataacctcgggaaactgaggctaataccgcatacgccccttcggggggaaagatttatcgctgttggatgaacccgcgtcggattagctagttggtggggtaagagcccaccaaggcgacgatccgtagctggtctgagaggatgatcagccacactgggactgagacacggcccagactcctacgggaggcagcagtggggaatattggacaatgggcgcaagcctgatccagcaatgccgcgtgaatgatgaaggccctagggttgtaaagttctttcgacggggacgatgatgacggtacccgtagaagaagcccccggctaacttcgtgccagcagccgcggtaat

SEQ ID NO: 8815 - DNA, 490 bp, unidentified
  misc_feature 1..490: note = Ascusbbf_1824550, encodes 16S rRNA
  source 1..490: mol_type = genomic DNA
agagtttgatcatggctcaggacgaacgctggcggcgtgcctaacacatgcaagtcgaacggagttacttcgacagaaaccttcgggtggaagatgatttaacttagtggcggacgggcgagtaacgcgtgaataacctgcccataagagggggataacacagagaaatttgtgctaataccgcatattgagatttaaccgcatgattttatcttgaaagattttatcgcttatggatggattcgcgtaagattagctagttggtgaggtaacggctcaccaaggcgacgatctttagccgaactgagaggttgatcggccgcattgggactgagacacggcccagactcctacgggaggcagcagtgggggatattgcgcaatgggggcaaccctgacgcagcaacgccgcgtgcgggaagaaggtcttcggattgtaaaccgttgtcgcaagggaagaagacagtgacggtaccttgtgagaaagcca

SEQ ID NO: 8816 - DNA, 490 bp, unidentified
  misc_feature 1..490: note = Ascusbbf_1159793, encodes 16S rRNA
  source 1..490: mol_type = genomic DNA
agagtttgatcatggctcaggatgaacgctggcggcgtgcataacacattcaagtcgaacggacaccttcgggtgttagtggcggacgggtgagtaacgcgtgaggaacctgccgcggattggggaataacgaccggaaacagtcgctaataccgcataacgcagagatgtcgcatggcaattctgccaaagatttatcgatccgcgatggactcgcgtccaattaggcagttggcggggcaacggcccaccaaaccgacgattggtagccgaactgagaggttgaacggccacattggaactgagatacggtccagactcctacgggaggcagcagtggggaatattgggcaatgggcgaaagcctgacccagcgacgccgcgtgagggaagaaggtcttcggattgtaaacctctttcagcagggaagaaacaaatgacggtacctgcagacaagtcacggctaactacgtgccagcagccgcggtaa

SEQ ID NO: 8817 - DNA, 490 bp, unidentified
  misc_feature 1..490: note = Ascusbbf_726021, encodes 16S rRNA
  source 1..490: mol_type = genomic DNA
agagtttgatcctggctcaggatgaacgctggcggcgtgcctaacacatgcaagtcgagcgggaattcaccgaccaaagcttcggcagcgggaagtgaaggagagcggcggacgggtgagtaacgcgtaggtaacctaccttatgcacagggatagccccgggaaactggaattaatacctgataacgcggaggagtcacatggctccatcgccaaagatttatcggcataagatggacctgcgtctgattagctggttggtgaggtaacggcccaccaaggcgacgatcagtagccgacctgagagggtaatcggccacattggaactgagacacggtccaaactcctacgggaggcagcagtggggaatattacacaatgggcgcaagcctgatgtagcaacgccgcgtgagcgaagaaggtcttcggatcgtaaagctctgtcctttgggacgaaggaagtgacggtaccaaaggaggaagccccgg

SEQ ID NO: 8818 - DNA, 490 bp, unidentified
  misc_feature 1..490: note = Ascusbbf_1299969, encodes 16S rRNA
  source 1..490: mol_type = genomic DNA
agagtttgatcctggctcagattgaacgctggcggcatgctttacacatgaaagtcggacggcagcgggggtgcttgcacctgccggcgagtggcgaacgggtgagtaatgcatcggaacgtgcccatgtggtgggggataactactcgaaagagtggctaataccgcatacgccctgagggggaaagcgggggattcttcgggacctcgcgccattggagcggccgatgtcggattagctagtaggtggggtaaaggctcacctaggcgacgatccgtagctgctgagaggatgatcagccacactgggactgagacacggcccagactcctacgggaggcagcagtggggaattttggacaatgggggcaaccctgatccagccatgccgcgtgagtgaagaaggccttcgggttgtaaagctctttcagtcgggaagaaacggtgttctctaacatagggcactaatgacggtaccgacagaagaag

SEQ ID NO: 8819 - DNA, 490 bp, unidentified
  misc_feature 1..490: note = Ascusbbf_372892, encodes 16S rRNA
  source 1..490: mol_type = genomic DNA
agagtttgatcatggctcaggacgaacgctggcggcgtgcctaatgcatgcaagtcgagcgacgcatactggaggggtaacccactggtatgacggagcggcgaacgggtgagtaacacgtgagcaacctgccccgaagaccgggatagcccagggaaacctggattaataccggataccctcggaggtctgcatagaccaccgaggaaaagcttttgtgcttcgggatgggctcgcggcctatcagcttgttggtgaggtaacggctcaccaaggcatcgacgggtagctggtctgagaggacgatcagccacactgggactgagacacggcccagactcctacgggaggcagcagcagggaatcttgcgcaatgggcgaaagcctgacgcagcaacgccgcgtgggggatgacggccttcgggttgtaaacccctttcagaagggaagaaattgacggtaccttcagaagaagccccggccaactacg

SEQ ID NO: 8820 - DNA, 480 bp, unidentified
  misc_feature 1..480: note = Ascusbbf_759003, encodes 16S rRNA
  source 1..480: mol_type = genomic DNA
agagtttgatcatggctcagaacgaacgctggcggcatgcctaacacatgcaagtcgaacgggatcctggtttcggccaggtgagagtggcggacgggtgagtaacacgtgggaacctgccttttggttcgggataaccgcgggaaactgcggctaataccggatgctcccgtgaggggaaagatttatcgccagaagaggggcccgcgtccgattaggtagttggtggggtaatggcctaccaagccgacgatcggtagctggtctgagaggatgatcagccacactgggactgagatacggcccagactcctacgggaggcagcagtggggaatattggacaatgggggcaaccctgatccagcaatgccgcgtgagtgatgaaggccttagggttgtaaagctcttttgccagggaagatgatgactgtacctggagaataagccccggctaacttcgtgccagcagccgcggtaat

SEQ ID NO: 8821 - DNA, 490 bp, unidentified
  misc_feature 1..490: note = Ascusbbf_725559, encodes 16S rRNA
  source 1..490: mol_type = genomic DNA
agagtttgatcctggctcaggatgaacgctagcggcaggcctaacacatgcaagtcgaggggcagcgcggggtagcaataccctggcggcgaccggcgcacgggtgcgtaacgcgtatgcaacccacccatgggtgggggataacccggagaaatccggactaataccccgtaacacattcttccgcatggagggatgttgaaagattcatcgtccatggacgggcatgcgtggcattaggtagttggcggggcaacggcccaccaagccatcgatgcctaggggagctgagaggctaatcccccacactggtactgagacacggaccagactcctacgggaggcagcagtgaggaatattggtcaatggagggaactctgaaccagccatgccgcgtgagggaagaaggccctatgggttgtaaacctcttttgcctgggggcaataaggtccttgcgagggtcgatgagagtaccaggcgaataagca

SEQ ID NO: 8822 - DNA, 490 bp, unidentified
  misc_feature 1..490: note = Ascusbbf_823271, encodes 16S rRNA
  source 1..490: mol_type = genomic DNA
agagtttgatcctggctcaggacgaacgctggcggcgtgcttaatacatgcaagtcgaacgaggtccaaccaatcgcaagattggggacgacctagtggcgaacgggtgcgtaacacgtgaggaacctgccccgatctctggaataacaagtggaaacacttgctaataccggatgccgtcggaccgccgcatggcggaccgccgaaagattcatcggatcgggagggtctcgcggcctatcagcttgttggcgaggtaacggctcaccaaggcttcgacgggtagctggtctgagaggatgatcagccacactgggactgagacacggcccagactcctacgggaggcagcagtagggaatcttgcacaatgggcgaaagcctgatgcagcaacgccgcgtgcgggaagaaggccctagggttgtaaaccgctttcagcagggaagaaaatgacggtacctgtagaagaaggtgcggccaactacgtgc

SEQ ID NO: 8823 - DNA, 470 bp, unidentified
  misc_feature 1..470: note = Ascusbbf_1479837, encodes 16S rRNA
  source 1..470: mol_type = genomic DNA
agagtttgatcatggctcagagcgaacgctggcggcatgcctaacgcatgcaagtcgcacgccctgcaaggggagtggcggacgggtgcgtaacgcgtagggatctgtcctgaggtgggggataaccctgggaaactagggctaataccgcatgatacctgagggtcaaaggcgcaagtcgccttgggaggaacctgcgtccgattagcttgttggtggggtaatggcctaccaaggctgcgatcggtagctggtctgagaggatgatcagccacactgggactgagacacggcccagactcctacgggaggcagcagtggggaatattggacaatgggcgcaagcctgatccagcaatgccgcgtgggtgaagaaggtcttcggattgtaaagccctttcggcggggacgatgatgacggtacccgcagaagaagccccggctaacttcgtgccagcagccgcggtaat

SEQ ID NO: 8824 - DNA, 490 bp, unidentified
  misc_feature 1..490: note = Ascusbbf_1160314, encodes 16S rRNA
  source 1..490: mol_type = genomic DNA
agagtttgatcatggctcaggattaacgctggcggcgtgcctaatgcatgcaagtcgaacgtggtcccttcggggattaacgtggcggacgggtgaggaacacgtggggaacctgcccatcggtagggggtagcccgcggaaacgcggggtaattccgtatacgctggcctgggggcagcccgggtcaggaaagggtctttcgagactcgccgatggaggggcctgcgtccgattagcttgttggtggggtaacggcctaccaaggcggtgatcggtagctggtctgagaggacggccagccacagggggactgagacacggcccccactcctacgggaggcagcagcaaggagttttccgcaatgggcgaaagcctgacggagcaacgccgcgtgggggatgacacctttcggggcgtaaaccccttttcttggggacgaagcagtgacggtacccgaggaagaaggcccggctaactacgtgccagca

SEQ ID NO: 8825 - DNA, 490 bp, unidentified
  misc_feature 1..490: note = Ascusbbf_585131, encodes 16S rRNA
  source 1..490: mol_type = genomic DNA
agagtttgatcctggctcagaatgaacgttggcggcgtggattaggcatgcaagtcgagcgagaaccccgcaaggggggacagcagcaaacggggtagtaatgtgtcggaacgtgccctctggacggggatagcggcgggaaactgccggtaatacccgatgaactcgagagagcaaaggtgtgattccgccggaggagcggccgacatggtattagctagttggtgaggtaacggctcaccaaggctttgatgcctaggggatgtgagagcatgatccccaccattgggactgagacactgcccagacacctacgggtggctgcagtcgagaatcttcgtcaatgggcgaaagcctgaacgagcgacgccgcgtgcgggatgaaggcccttgggttgtaaaccgctgtcgagggggatgaaggcttgaaggtactccttcaagtttgacagagccctggaggaagcacgggctaagttcgtgccagcag

SEQ ID NO: 8826 - DNA, 490 bp, unidentified
  misc_feature 1..490: note = Ascusbbf_1824777, encodes 16S rRNA
  source 1..490: mol_type = genomic DNA
agagtttgatcctggctcaggatgaacgctagcggcaggcttaacacatgcaagtcgaggggcagcggttgtagcaatacaagccggcgaccggcgcaagggtgcgtaacgcgtgagcaatctgcccgtatcagggggataagcgatgggaacgtcgtctaataccgcataacactgtttgtggcatcacagatagttgaaagcttcggtggatacggatgagctcgcgagacattagttagtcggcggggtaacggcccaccaagaccgcgatgtctaggggaactgagaggttggtcccccacactggaactgagacacggtccagactcctacgggaggcagcagtgaggaatattggacaatggtcggaagactgatccagccatgccgcgtgaaggataaggtcctatggattgtaaacttcttttgagagggagcaataaggtagtcgagactaccgatgagagtacctttcgaataagcatcg

SEQ ID NO: 8827 - DNA, 490 bp, unidentified
  misc_feature 1..490: note = Ascusbbf_1804182, encodes 16S rRNA
  source 1..490: mol_type = genomic DNA
agagtttgatcatggctcaggacgaacgctggcggcgtgcttaacacatgcaagtcgaacgaagcttgaagatagatttcttcggaatgacatctgatatgactgagtggcggacgggtgagtaacgcgtgagcaacctgcccttcggagggggatagcgtttggaaacgaacggtaataccgcataatgttaacggaaggcatcttctgttaaccaaaactccggtgccgaaggatgggctcgcgttggattagatagttggtggggtaacggcctaccaagtcgacgatccatagccggactgagaggttgaacggccacattgggactgagacacggcccagactcctacgggaggcagcagtggggaagattgcacaatgggggaaaccctgatgcagcaacgccgcgtgaaggaagacggttttcggattgtaaacttctgttcttagggaagaagaaagtgacggtacctaaggagcaagccac

SEQ ID NO: 8828 - DNA, 490 bp, unidentified
  misc_feature 1..490: note = Ascusbbf_503332, encodes 16S rRNA
  source 1..490: mol_type = genomic DNA
agagtttgatcctggctcaggacgaacgctggcggtgtgcttaacacatgcaagtcgagcggggtccatccggtggcaacaccggtgaagacctagcggcgaacgggtgagtaacacgtgaggaacctgccccgaagtcgggaacaacccggggaaacccgggctaatgcccgataccccccactgatcgcatggtcggtggaggaaagatttatcgcttcgggagggcctcgcggcctatcagcttgttggtggggtaatggcctaccaaggcagcgacgggtagctggtctgagaggacgatcagccacactgggactgagacacggcccagactcctacgggaggcagcagtggggaatcttgcgcaatgggcgaaagcctgacgcagcaacaccgcgtgcgggatgaaggccttcgggttgtaaaccgctttcagcagggacgaaattgacggtacctgcagaagaagccccggccaactacgtgc

SEQ ID NO: 8829 - DNA, 490 bp, unidentified
  misc_feature 1..490: note = Ascusbbf_317960, encodes 16S rRNA
  source 1..490: mol_type = genomic DNA
agagtttgatcctggctcaggatgaacgctggcggcgtgcttaatacatgcaagtcgaacgctgatatagtcttcggactattgatgagtggcgaacgggtgagtaatacgtaggtaatctaccctgctgagcgggataacagttggaaacgactgctaataccgcataggtaatcagatggcatcaactgattattaaagtcgcgtttgcggcactgcaggatgagcttacggtgcattagttagttggtgaggtaacggcccaccaagaccgtgatgcatagccggcctgagagggtgaacggccacattgggactgagacacggcccagactcctacgggaggcagcagtaaggaattttcggcaatggacgaaagtctgaccgagcaacgccgcgtgagtgatgaaggtcttcggatcgtaaagctctgttgtaaaggaagaacaagcagattaggaaatgaatctgttctgacggtactttacta

SEQ ID NO: 8830 - DNA, 490 bp, unidentified
  misc_feature 1..490: note = Ascusbbf_516633, encodes 16S rRNA
  source 1..490: mol_type = genomic DNA
agagtttgatcatggctcaggatgaacgctggcggcgtgcttaacacatgcaagtcgaacgaattttttactgaaggaagcttcggcagacggaggtaagaagtgagtggcggacgggtgagtaacgcgtgggtaacctgcctcacattgggggataccagtcggaaacgactgctaaaaccgcataagaccacagcaccgcatggtgcggcggccaaaactccggtgatgtgagatggacccgcgtctgattagccagttggcggggtaacggcccaccaaagcgacgatcagtagccgacctgagagggtgatcggccacattgggactgagacacggcccaaactcctacgggaggcagcagtggggaatattgcacaatgggggaaaccctgatgcagcgacgccgcgtgagcgatgaagtatttcggtacgtaaagctctatcagcaggaacgataatgacggtacctgactaagaagcaccggc

SEQ ID NO: 8831 - DNA, 490 bp, unidentified
  misc_feature 1..490: note = Ascusbbf_1710900, encodes 16S rRNA
  source 1..490: mol_type = genomic DNA
agagtttgatcatggctcaggatgaacgctagcggcaggcttaacacatgcaagtcgaggggcagcgcggagtagcaatactctggcggcgaccggcggaagggtgcgtaacgcgtgagcaacctgcccgtaaccgggacataaccgatggaaacgtcgcctaatttcccataacaactggattggcatcacttcagtttgaaagcttcggtggttacggatgggctcgcgagacattagctggttggtagggtaacggcctaccaaggcgacgatgtctaggggttctgagaggaaggtcccccacattggaactgagacacggtccagactcctacgggaggcagcagtgaggaatattggacaatggccggaaggctgatccagccatgccgcgtgcgggaggacggccctatgggttgtaaaccgcttttgcgagggagcaataagagtcacgtgtggctcgatgagagtacctcgcgaataagca

SEQ ID NO: 8832 - DNA, 490 bp, unidentified
  misc_feature 1..490: note = Ascusbbf_1259506, encodes 16S rRNA
  source 1..490: mol_type = genomic DNA
agagtttgatcctggctcagaatgaacgttggcggcgtggattaggcatgcaagtcgcgcgagaagtcccttcggggacggacagcggcgaaagggagaggaatacgtagaaatctaccctcgggtctgggatagcgtcgggaaactggcggtaataccggataacgtcttcggaccaaaggtgtgactccacctgaggatgagtctacgtcctattagctagttggcggggtaatggcccaccaaggcaacgatgggtagcgggtgtgagagcatgacccgcctcactgggactgagacactgcccagacacctacgggtggctgcagtcgagaatctttgtcaatggacgaaagtctgaacaagcgacgccgcgtgcgggatgaaggccttcgggttgtaaaccgctgtcgtaggggaacaaatgtattggggtactcccctttacttgagtgatcctaggaggaaggacgggctaagttcgtgccag

SEQ ID NO: 8833 - DNA, 490 bp, unidentified
  misc_feature 1..490: note = Ascusbbf_1611772, encodes 16S rRNA
  source 1..490: mol_type = genomic DNA
agagtttgatcatggctcaggatgaacgctggcggcgtgcctaacacatgcaagtcgaacgttagagtcatggaactagcaatagggaaatggctcaaaagtggcgaacgggtgagtaacacgtaggtaacctgccccgcagggggggataacgactggaaacggtcgctaataccgcatagtactgttttggggggaccctgaacagttaaaactttggtgctgcgcgaggggcctgcgtccgattagttagttggtgaggtaatggctcaccaaggcgatgatcggtagctggtctgagaggatgatcagtcacacgggaactgagacacggtcccgactcctacggggggcagcagtgaggaatattgcacaatggacgaaagtctgatgcagcaacgccgcgtggaggatgacggcccttgggttgtaaactccttttttcagggaagagagaggacggtacctgaagaataagtcacggctaact

SEQ ID NO: 8834 - DNA, 490 bp, unidentified
  misc_feature 1..490: note = Ascusbbf_1127068, encodes 16S rRNA
  source 1..490: mol_type = genomic DNA
agagtttgatcatggctcaggacgaacgctggcggcgtgcctaacacatgcaagtcgaacgaatgtactagcaatagtacattagtggcggacgggtgagtaatacatgagtaacctgccttatacagggggataacacctagaaatgggtgctaataccgcataataacctaatatggcatcataataggaggaaaggagaaatccggtaaaagatggactcatgttcgattagctagttggtggggtaaaggcctaccaaggcaacgatcgatagccgaactgagaggttgatcggccacattggaactgagaaacggtccagactcctacgggaggcagcagtggggaatattgcacaatggggggaaccctgatgcagcaacgccgcgtgagtgaggaagtatttcggtatgtaaagctctatcagcagggaagagattgacggtacctgcataagaagccccggctaactacgtgccagcagccg

SEQ ID NO: 8835 - DNA, 490 bp, unidentified
  misc_feature 1..490: note = Ascusbbf_1838655, encodes 16S rRNA
  source 1..490: mol_type = genomic DNA
agagtttgatcctggctcaggatgaacgctggcggcgtgcttaacacatgcaagtcgagcgagaaatgagagattgaatcttcggatgaaagatctcatggacagcggcggacgggtgagtaacgcgtgggcaacctgcccttaactgagggatagccgagggaaacttcgtgtaatacctcataacgcattttgaccgcatgatcgaaatgccaaagatttatcggttaaggatgggcccgcgttcgattagcttgttggtgaggtagcggctcaccaaggcgacgatcggtagccggcctgagagggtgaacggccacattggaactgagacacggtccagactcctacgggaggcagcagtggggaatattgcacaatgggcgaaagcctgatgcagcaacgccgcgtgaaggaagaaggtcttcggatcgtaaacttctgtccttagggaagaataatgacggtacctttggaggaagccccggct

SEQ ID NO: 8836 - DNA, 490 bp, unidentified
  misc_feature 1..490: note = Ascusbbf_1374868, encodes 16S rRNA
  source 1..490: mol_type = genomic DNA
agagtttgatcctggctcaggatgaacgctggcggcgtgcctaacacatgcaagtcgagcgtgatcggggagagtgcttgcactcatcccgtgaaagcggcggacgggtgagtaacgcgtaggtaacctgccttcggctcagggatagctccgggaaactgggattaatacctgataaagcgatgaggcctcctggtcttaccgccaaagatctatcggccgaagatggacctgcgtctgattagctagttggtgaggtaacggcccaccaaggcgacgatcagtagccgacctgagagggtaatcggccacattggaactgagacacggtccaaactcctacgggaggcagcagtggggaatattgcacaatgggcgcaagcctgatgcagcaacgccgcgtgagtgaagaaggtcttcggatcgtaaagctctgtccttggggacgaagaagtgacggtacccgaggaggaagccccggctaactacg

SEQ ID NO: 8837 - DNA, 470 bp, unidentified
  misc_feature 1..470: note = Ascusbbf_1031148, encodes 16S rRNA
  source 1..470: mol_type = genomic DNA
agagtttgatcctggctcagattgaacgctggcggcaggcctaacacatgcaagtcgaacgctgtagcaatacagagtggcagacgggtgagtaacgcgtgggaaccttcccaatggtgcggaatagcccagggaaacttggggtaataccgcataagcccttagggggaaagatttatcgccattggatgggcccgcgtcggattagctagttggtgaggtaatggctcaccaaggcaacgatccgcagctggtttgagagaatgaccagccacactgggactgagacacggcccagactcctacgggaggcagcagtggggaatcttggacaatgggcgaaagcctgatccagccatgccgcgtgagtgacgaaggccttagggttgtaaagctcttttgccggggaagataatgactgtacccggagaataagtcccggctaacttcgtgccagcagccgcggtaat

SEQ ID NO: 8838 - DNA, 482 bp, unidentified
  misc_feature 1..482: note = Ascusbbf_306496, encodes 16S rRNA
  source 1..482: mol_type = genomic DNA
agagtttgatcatggctcaggactaacgctggcggaatgcctcatacatgcaagtcgaacggcccttcggggcagtggcggacgggtgagtaacacgtaggtaacgtgccctttactgggggataacagagggaaacttctgctaataccgcataagacagtggttgaaatactgctgtttaaagatttatcggtaaaggatcggcctgcgtcggattagctagttggtagggtaaaggcctaccaaggcaacgatccgtaattggtctgagaggatgaccagtcacagtgggactgagacacggcccacactcctacgggaggcagcagtagggaatattgcgcaatgggcgaaagcctgacgcagcaattccgcgtggaggatgaaggttcttggatcgtaaactcctttcagtggtgacgattatgacggtagccacagaagaagcaccggctaactacgtgccagcagccgcggtaat

SEQ ID NO: 8839 - DNA, 490 bp, unidentified
  misc_feature 1..490: note = Ascusbbf_394818, encodes 16S rRNA
  source 1..490: mol_type = genomic DNA
agagtttgatcatggctcaggacgaacgctggcggcgtgcttaacacatgcaagtcgaacggggatacgacagatgagagcttcggcaggattcagttgtattcgagtggcggacgggtgagtaacgcgtgagcaatctatcccggacagggggataacacttggaaacaggtgctaataccgcataggaccacgctaccgcatggtagaggggtgaaaggagagatccggtctgggttgagctcgcgtccgattagccagttggcggggtaacggcccaccaaagcgacgatcggtagccggactgagaggttgaacggccacattggaactgagagacggtccaaactcctacgggaggcagcagtgggaatattgggcaatgggcgaaagcctgacccagcaacgccgcgtgagtgaagaaggccttcgggttgtaaagctctgttatgagggacgaaggagtgacggtacctcataaggaagcccc

SEQ ID NO: 8840 - DNA, 490 bp, unidentified
  misc_feature 1..490: note = Ascusbbf_1770851, encodes 16S rRNA
  source 1..490: mol_type = genomic DNA
agagtttgatcatggctcaggacgaacgctggcggcgtgcttcatacatgcaagtcgaacgacaggcatcctttcgggggtgtcatggagtggcgaacgggtgagtaacacgtgagtaatctgccttcagctttgggataacccccggaaacggggactaataccggatatgaccattgctcgcatgggtggtggtggaaagtttttcggctgaagatgggctcgcggcctatcagcttgttggtggggtaatggcctaccaaggcggtgacgggtagccggcctgagagggcgaccggccacactgggactgagacacggcccagactcctacgggaggcagcagtagggaatattgcgcaatgggcgaaagcctgacgcagcgacgccgcgtgagggatgacggccttcgggttgtaaacctctttcagcagggacgaagcgcaagtgacggtacctgcagaagaagctccggctaactacgtgccag

SEQ ID NO: 8841 - DNA, 490 bp, unidentified
  misc_feature 1..490: note = Ascusbbf_955055, encodes 16S rRNA
  source 1..490: mol_type = genomic DNA
agagtttgatcctggctcagaacgaacgctggcggcaggcttaacacatgcaagttgagcgggaattggagatagcttgctatcaaagaggagagcagcgcactggtgagtaacacgtgggaacgtaccttttggtgggggacaacagatggaaacgtctgctaataccgcataagccctgagggggaaaggagagatttgccgaaagatcggcccgcggaagattaggtagtaggtggggcaacggcctacctagccgacgatctatagctggtctgagaggacgatcagccacattggaactgagacacggtccagactcctacgggaggcagcagtgaggaatattggtcaatgggcgcgagcctgaaccagccaagtagcgtgcaggacgactgccctatgggttgtaaactgcttttatcagggaataaagtgaggcacgcgtgcctttttgtatgtacctgatgaataaggaccggctaattcc

SEQ ID NO: 8842 - DNA, 490 bp, unidentified
  misc_feature 1..490: note = Ascusbbf_1859030, encodes 16S rRNA
  source 1..490: mol_type = genomic DNA
agagtttgatcatggctcaggacgaacgctggcggcatgcctaacacatgcaagtcgaacggagtttacggagcttgctctgtaaacttagtggcggacgggtgagtaacgcgtgagcaacctgcctttcagtggggaataatgttctgaaaaggacactaataccgcataacgtactgaggtcgcatggccatggtaccaaaggatttattcgctgagagatgggctcgcgtccgattagctagttggtggggtaacggcctaccaaggcgacgatcggtagccggactgagaggttgaacagccacattgggactgagacacggcccagactcctacgggaggcagcagtgggggatattgcgcaatgggggaaaccctgacgcagcaatgccgcgtgaaggattgaaggtcttcggattgtaaacttcttttgtcagggacgataatgacggtacctgacgaataagctccggctaactacgtgcca

SEQ ID NO: 8843 - DNA, 490 bp, unidentified
  misc_feature 1..490: note = Ascusbbf_1114481, encodes 16S rRNA
  source 1..490: mol_type = genomic DNA
agagtttgatcctggctcaggacgaacgctggcggcgtgcttaacacatgcaagtcgagcgaagctcttctcttcggagaagatgacttagcggcgaacgggtgagtaacacgtgggcaacctgcccttagctctgggataagcgatggaaacgtcgtctaataccggatacgacacgggacggcatcatcaccgtgtggaaagaatttcggctaaggatgggcccgcggcctatcagcttgttggtggggtaatggcctaccaaggcttcgacgggtaaccggcctgagagggcgaccggtcacactgggactgagacacggcccagactcctacgggaggcagcagtgggaatattgcacaatgggcgaaagcctgatgcagcgacgccgcgtgagggatgacggccttcgggttgtaaacctctttcagcagggacgaagcgaaagtgacggtacctgcagaagaagcgccggccaactacgtgcca

SEQ ID NO: 8844 - DNA, 160 bp, unidentified
  misc_feature 1..160: note = Ascusbbf_385660, encodes 16S rRNA
  source 1..160: mol_type = genomic DNA
agagtttgatcctggctcagcagccgcggtaatgccagcagccgcggtaatagagtttgatcctggctcagagtttgatcctggctcagagtttgatcctggctcagagtttgatcctggctcagagtttgatcatggctcagccagcagccgcggtaat

SEQ ID NO: 8845 - DNA, 490 bp, unidentified
  misc_feature 1..490: note = Ascusbbf_1052157, encodes 16S rRNA
  source 1..490: mol_type = genomic DNA
agagtttgatcatggctcaggatgaacgctggcggcgtgcctaatacatgcaagtcgaacggggtcgatgagagcttgctccttgaagccaagtggcgaacggatgagtaacacgtaggtaacctgcctttcagtttgggatacccagaggaaactttggctgataccggataactaatttagaggcatctctagattctaaaaggggctccaaaacctcgctgattgatggacctgcggcgcattagctagttggtgagataacagcccaccaaggcgaggatgcgtagccgacctgagagggtgaacggccatactggaactgagacacggtccagactcctacgggaggcagcagtagggagttttcggcaatgggcgaaagcctgaccgagcaacgccgcgtgagtgatgaaggtcttcggattgtaaaactctgttgtaggggaagaacggtacggtgaggaaatgctccgtatttgacggtacc

SEQ ID NO: 8846 - DNA, 490 bp, unidentified
  misc_feature 1..490: note = Ascusbbf_1046234, encodes 16S rRNA
  source 1..490: mol_type = genomic DNA
agagtttgatcctggctcaggacgaacgctggcggcgcgcctaacacatgcaagtcgaacggaacttttgagtgacttcggtttctcttgagtttagtggcggacgggtgagtaaagcatgagtaactttcccttgagtggggaataacttttggaaacagaagataataccgcatacttcaaaggatcgcatgatcttttggcaaagattttcgcttttggataggctcatgtctgattagcttgttggtgaggtaatggctcaccaaggcttcgttcagtagccgtaccgagaggttctacggccacattgggactgagacacggcccagactcctacgggaggcagcaatgaggaatattgcgcaatggaggaaactctgacgcagcgacgccgtgtgaaggatgaaggtcttcggattgtaaacttctgtcctcagggaagaaatcaatgacggtacctggggaggaagccccggctaactacgtg

SEQ ID NO: 8847 - DNA, 490 bp, unidentified
  misc_feature 1..490: note = Ascusbbf_1324912, encodes 16S rRNA
  source 1..490: mol_type = genomic DNA
agagtttgatcctggctcaggatgaacgctggcggcgtgcctaacacatgcaagtcgaacggaaagaattcttcggaattctttcagtggcggacgggtgagtaacgcgtgggtaacctgccccatacaggggaacaacagctggaaacggctgctaataccgcataagcgcacagtactgcatggtacagtgtgaaaagatgctatcggtatgggatggacccgcgtctgattagctagttggcggggtaacggcccaccaaggcgacgctcagtagccgccctgggagggtgaccggccgaattgtgactgagccacggcccaaactcctacagggggcagcagtgggggatattgcacaatgggcgaaagcctgatgcagcgacgccgcgtgagtgaggaagtatttcggtatgtacagctctatcagcagggaagaaaatgacggtacctgactaagaagccccggctaactacgtgccagcagcc

SEQ ID NO: 8848 - DNA, 490 bp, unidentified
  misc_feature 1..490: note = Ascusbbf_998003, encodes 16S rRNA
  source 1..490: mol_type = genomic DNA
agagtttgatcatggctcgggacgaacgctggcggcgtgcctaacacatgcaagtcgagcgaagtatttaaagaagatctcttcggagtgaaactttaaatatcttagcggcggacgggtgagtaacgcgtgagaaacctgcctttcacaaagggatagcctcgggaaactgggattaataccttatgatgtttcatcttagcattaagaagaaaccaaagcgtaaagcggtgaaagatggtctcgcgtcccattagctagttggtgagataaaagcccaccaaggcgacgatgggtagccggcctgagagggtgaacggccacactggaactgagacacggtccagactcctacgggaggcagcagtggggaatattgcacaatggaggaaactctgatgcagcgacgccgcgtgagcgatgaaggctttcgagtcgtaaagctctgtcctaggggacgataatgacggtaccctaggaggaagccccg

SEQ ID NO: 8849 - DNA, 490 bp, unidentified
  misc_feature 1..490: note = Ascusbbf_876882, encodes 16S rRNA
  source 1..490: mol_type = genomic DNA
agagtttgatcctggctcagattgaacgctggcggcatgcttaacacatgcaagtcgaacggcagcagcatctagcttgctagatggctggcgagtggcggacgggtgagtaatatctaggaatctaccccagagagggggataagtcggggaaactcggtctaataccgcatacactctacggagcaaagcaggggaccttcgggccttgcgctttgggatgagcctagatcggattagctagttggtggggtaatggcctaccaaggcaacgatccgtagctggtctgagaggacgaccagccacactgggactgagacacggcccagactcctacgggaggcagcagtggggaatattggacaatgggcgcaagcctgatccagcaatgccgcgtgtgtgaagaaggccttcgggttgtaaagcacttttagtaaggaagaaaggctcaagattaatacccttgagagttgacgttacttacagaaa

SEQ ID NO: 8850 - DNA, 489 bp, unidentified
  misc_feature 1..489: note = Ascusbbf_672333, encodes 16S rRNA
  source 1..489: mol_type = genomic DNA
agagtttgatcctggctcaaattgaacgctggcggcaggcctaatacatgcaagtcgaacgaagtagcaatacttagtggcgcaagggtgaggaacacgtgagtgacctgcccgcaagtttggaacagctcctggaaacgggaattaataccggatgtgatcatattgctgcatggtgatatgattaaagcagtaatgcgcttgcggatgggctcgcgtcccattagctagttggtgaggtaacggcccaccaaggccatgatgggtagctggtctgagaggacgaccagccacactgggactgagaactgcccagactcctacgggaggctgcagtcgagaattttgggcaatggacgagagtctgacccagcaatgccgcgtgcgggatgaaggtcttcggattgtaaaccgctgtttggagggacgaaaattgacggtacttccagagaaagccacggctaactacgtgccagcagccgcggtaat

SEQ ID NO: 8851 - DNA, 490 bp, unidentified
  misc_feature 1..490: note = Ascusbbf_1874000, encodes 16S rRNA
  source 1..490: mol_type = genomic DNA
agagtttgatcctggctcaggacgaacgctggcggcgtgcttaacacatgcaagtcgaacgatgaagctggagcttgctctggtggattagtggcgaacgggtgagtaatacgtgagcaacgtgccccttcctctggaataacttcgagaaatcggagctaatactggatatgtggcgtgaccgcatggtctgcgtctggaaagatttatcggggagggatcggctcacggcctatcagcttgttggtgaggtaatggctcaccaaggcgacgacgggtagccggcctgagagggtgaccggccacactgggactgagacacggcccagactcctacgggaggcagcagtggggaatattgcacaatgggcgaaagcctgatgcagcaacgccgcgtgggggatgacggccttcgggttgtaaacctcttttagtagggaagaagtggcgtgttttcatgtcgtgacggtacctgcagaaaaagcaccgg

SEQ ID NO: 8852 - DNA, 490 bp, unidentified
  misc_feature 1..490: note = Ascusbbf_1820219, encodes 16S rRNA
  source 1..490: mol_type = genomic DNA
agagtttgatcatggctcaggacgaacgctggcggcgtgcctaatacatgcaagtcgaacgcttggagttccttcgggagcttcaggagtggcggacgggtgagtaacacgtaggcaacctgcctgtaagacagggataactagtggaaacactagctaataccagataattaatcctctcgcatgagaagattatgaaaggcggtttcggctgccacttacggatgggcctgcggcgcattagctagtaggtaaggtaacggcttacctaggcgacgatgcgtagccgacctgagagggggatcggccacactgggactgagacacggcccagactcctacgggaggcagcagtagggaatcttccgcaatggacgaaagtctgacggagcaacgccgcgtgagtgatgaaggttttcggatcgtaaagctctgttgccagggaagaacaggagtgagagtaactgctcactttgtgacggtacctgag

SEQ ID NO: 8853 - DNA, 490 bp, unidentified
  misc_feature 1..490: note = Ascusbbf_1840634, encodes 16S rRNA
  source 1..490: mol_type = genomic DNA
agagtttgatcatggctcaggatgaacgctagcggcaggcttaacacatgcaagtcgaggggcagcgcgatggtagcaataccgttggcggcgaccggcgcaagggtgcgtaacgcgtgagcaacatgcccgtatcagggggaaaagcgatggaaacgtcgtctaataccgcataataatttgtcaggcatctgatggatttgaaagttttgacggatacggattggctcgcgagacattagctagacggcggggtaacggcccaccgtggcgacgatgtctaggggttctgagaggaaggtcccccacactggaactgagacacggtccagactcctacgggaggcagcagtgaggaatattggacaatggtcggaagactgatccagccatgccgcgtgaaggaagacggtcctatggattgtaaacttcttttgtacgagagcaataaggtgtacgtgtacactgatgagagtatcgtacgaataag

SEQ ID NO: 8854 - DNA, 490 bp, unidentified
  misc_feature 1..490: note = Ascusbbf_1124416, encodes 16S rRNA
  source 1..490: mol_type = genomic DNA
agagtttgatcctggctcagaatgaacgttggcggcgtggattaggcatgcaagtcgagcgagaagctcccttcggggagtggagagcggcggaagggacagtaacacgtagattacgtatcctcgggtccgggataactgtgcgaaagcacttgtaataccggataacatcttcggatcaaaggtgtgattccgcctaaggagcggtctgcgtcctattagtttgttggtggggtaatggcctaccaaggctttgatgggtagcgggtgtgagagcatgacccgcgtcactgggactgagacactgcccagacacctacgggtggctgcagtcgagaatcttcggcaatgggcgaaagcctgaccgagcgacgccgcgtgcgggatgaaggccttcgggttgtaaaccgctgtcagtggggaggaaggctgcgtgaagaacgcagtttgacctatcttcagaggaaggacgggctaagttcgtgccagc

SEQ ID NO: 8855 - DNA, 490 bp, unidentified
  misc_feature 1..490: note = Ascusbbf_1770437, encodes 16S rRNA
  source 1..490: mol_type = genomic DNA
agagtttgatcatggctcagattgaacgctggcggcatgcctaacacatgcaagtcgaacggcaacacggtctagcttgctagactggtggcgagtggcgaacgggtgagtaacgcgtaggaatatgccttaatgagggggacaacttggggaaactcaagctaataccgcataatctctgaggagagaagctggggaccgcaaggcctggcgctttaagattagcctgcgtccgattagctagttggtagggtaaaggcctaccaaggcgacgatcggtagctggtctgagaggatggccagccacactgggactgagacacggcccagactcctacgggaggcagcagtggggaatattggacaatggggggaaccctgatccagcaatgccgcgtgtgtgaagaaggcctgagggttgtaaagcactttcagtggggaggagggcaagcgggttaagagctggcttgttggacgttacccacagaag

SEQ ID NO: 8856 - DNA, 490 bp, unidentified
  misc_feature 1..490: note = Ascusbbf_1016220, encodes 16S rRNA
  source 1..490: mol_type = genomic DNA
agagtttgatcctggcttaggataaacgctggcggcgtgcataacacattcaagtcgaacgaagctccggaacttgcttgcaagggaaggaagacttagtggcggacgggtgggtaacgcgtgagcaatctgccttggggtgcgggataacgtttggaaacggacgctaataccgcatgacgcatggatatcgcatggtgaccatgccaaagatttattgccctgagatgagctcgcgtccgattagatagttggtgaggtaacggctcaccaagtcagcgatcggtagccggactgagaggttgaacggccacattggaactgagatacggtccagactcctacgggaggcagcagtggggaatattgggcaatgggcgaaagcctgacccagcgacgccgcgtgagggaagaaggtcttcggattgtaaacctctttcagcagggaagaaggaagtgacggtacctgcagaagaagccacggctaact

SEQ ID NO: 8857 - DNA, 490 bp, unidentified
  misc_feature 1..490: note = Ascusbbf_1896578, encodes 16S rRNA
  source 1..490: mol_type = genomic DNA
agagtttgatcctggctcaggacgaacgctggcggcgtgcttaacacatgcaagtcgaacgaggttatttaccggaagtcttcggatggaaagtggataaccgagtggcggacgggtgagtaacgcgtgagcaacctgtcttctacagggggataacactccgaaaggagcgctaataccgcataagaccacggtttcgcatgggactgaggtcaaaggaggaatccggtagaaggtgggctcgcgtcccattagatagttggtgaggtaacggctcaccaagtcgatgatgggtagccgacctgagagggtgatcggccacattggaactgagatacggtccagactcctacgggaggcagcagtggggaatattgggcaatgggcgaaagcctgacccagcaacgccgcgtgagggaagaaggttttcggattgtaaacctctgtccttggtgaagatcatgacggtagccgaggaggaagctccggc

SEQ ID NO: 8858 - DNA, 490 bp, unidentified
  misc_feature 1..490: note = Ascusbbf_734217, encodes 16S rRNA
  source 1..490: mol_type = genomic DNA
agagtttgatcatggctcagaatgaacgttggcagcgtggattaggcatgcaagtcgagcgacaagtttcccttcggggagatggaggagcggctaacggggtagtaaggcatcggaacgtacccttcagtcgggaatagccacgggaaactgtgagtaatgcccgatgatatcttcggatcaaaggtccgccgctgagggagcggccgatgtgagactaggtagttggcggggtaacggcccaccaagccagagatctctagggggtgtgagagcatgacccccaccactgggactgagatactgcccagacacctacgggtggctgcagtcgagaatcttcggcaatgggcgcaagcctgaccgagcgacgctgcgtgcgggatgaaggcccttgggttgtaaaccgctgtcagaggggatgaaagcgcaagcttgacagagcctcagaggaagcgcgggctaagttcgtgccagcagccgcggtaat

SEQ ID NO: 8859 - DNA, 490 bp, unidentified
  misc_feature 1..490: note = Ascusbbf_1821498, encodes 16S rRNA
  source 1..490: mol_type = genomic DNA
agagtttgatcatggctcaggacgaacgctggcggcgtgcctaacacatgcaagtcgagcgagaatctttgaagtagcttgctacggagaagaggacagcggcggacgggtgagtaacgcgtaggtaagctgccccttgcagaaggatagcctcgggaaactgggattaatacttcataaagcgttttcatcgcatggtgagaacgccaaagatctatcggcaagggatgcacctgcgtctgattagatagttggtagggtaacggcctaccaagtcaacgatcagtagccgacctgagagggtaatcggccacattggaactgagacacggtccaaactcctacgggaggcagcagtggggaatattgcacaatgggcgaaagcctgatgcagcaacgccgcgtgagtgaagaaggtcttcggattgtaaaactctgttcttgggaaagaaaaaatgacggtacccaaggagaaagccccggctaacta

SEQ ID NO: 8860 - DNA, 490 bp, unidentified
  misc_feature 1..490: note = Ascusbbf_1812975, encodes 16S rRNA
  source 1..490: mol_type = genomic DNA
agagtttgatcatggctcaggatgaacgctagcggcaggcttaacacatgcaagtcgaggggcatcgcgggggtagcaatacacctggcggcgaccggcggaagggtgcgtaacgcgtgagcaacatgcccgtcacagggggataaaagatggaaacgtctcctaataccccataacatcgtttgaggcatctcagatggttgaaagttacggcggtgacggattggctcgcgtgacattagctagttggagtggtaacggcacaccaaggcgacgatgtctaggggttctgagaggaaggtcccccacactggaactgagacacggtccagactcctacgggaggcagcagtgaggaatattggtcaatgggcggaagcctgaaccagccatgccgcgtgaaggaataaggtcctatggatcgtaaacttcttttgtgcgggagcaataagggctacgtgtagtccgatgagagtaccgtacgaataag

SEQ ID NO: 8861 - DNA, 470 bp, unidentified
  misc_feature 1..470: note = Ascusbbf_501442, encodes 16S rRNA
  source 1..470: mol_type = genomic DNA
agagtttgatcatggctcagaacgaacgctggcggcaggcctaaaacatgcaagtcgaacgatgtagcaatacatagtggcgcacgggtgagtaacacgtgggaacataccctttggtgcggaacaacgtctggaaacggacgctaataccgcataatatctacggatcaaagatttatcgccaagggattggcccgcgctagattaggtagttggtgaggtaatggctcaccaagcctacgatctatagctggtttgagaggatgatcagccacactgggactgagacacggcccagactcctacgggaggcagcagttaggaatattggacaatgggcgaaagcctgatccagccatgccgcgtgtgtgatgaaggccttagggttgtaaagcactttcgtccgcgaagataatgacagtaccggaagaagaagctccggctaaattcgtgccagcagccgcggtaat

SEQ ID NO: 8862 - DNA, 490 bp, unidentified
  misc_feature 1..490: note = Ascusbbf_1880223, encodes 16S rRNA
  source 1..490: mol_type = genomic DNA
agagtttgatcctggctcagaacgaacgccggcggcgcgtcttaagcatgcaagtcgggcgggattcaggtgcttgcacctgatgagagcggcggactggcgaggaacgcgtgggcgacgtgccccccgcaccgggacagccggcagaaatgccgggtgatacgggatgcggtccggtactgtggtggtgccggaggaaagctgccacggcagcggcgggggagcggcccgcgtcccatcagctagtaggcggggcaagggcccacctaggcgacgacgggtacccggactgagaggtcggacgggcgcattgggactgagatacggcccagactcctacgggaggcagcagctaagaatattccgcaatgggcgaaagcctgacggagcgacgccgcgtggacgatggaggccggaaggttgtaaagtcctctggcgcctgaggaaaaaccgccgcagggaatggcggcgggatgactgtagggcgaga

SEQ ID NO: 8863 - DNA, 490 bp, unidentified
  misc_feature 1..490: note = Ascusbbf_1818358, encodes 16S rRNA
  source 1..490: mol_type = genomic DNA
agagtttgatcctggctcaggatgaacgctagctacaggcttaacacatgcaagtcgaggggcagcatgaaccaagcttgcttggtttgatggcgaccggcgcacgggtgagtaacgcgtatccaaccttccccctggtagggcatagcccggcgaaagtcggattaataccctatgttctccttcgagagcatttgacgaggagcaaagatttatcgccatgggatggggatgcgtccgattaggttgacggcggggtgacggcccaccgtgcccgcgatcggtaggggttctgagaggaaggtcccccacattggaactgagacacggtccaaactcctacgggaggcagcagtgaggaatattggtcaatgggcgtaagcctgaaccagccaagtagcgtgcgggacgacggccctatgggttgtaaaccgcttttgcaggggaataaagtgtgggacgtgtcccattttgcatgtaccctgagaat

SEQ ID NO: 8864 - DNA, 490 bp, unidentified
  misc_feature 1..490: note = Ascusbbf_1769666, encodes 16S rRNA
  source 1..490: mol_type = genomic DNA
agagtttgatcctggctcaggacgaacgctggcggcgtgcctaatacatgcaagttgagcgctgaagattggtacttgtaccgattggatgagcagcgaacgggtgagtaacgcgtggggaatctgcctttgagcgggggacaacatttggaaacgaatgctaataccgcataatagctttaaacataagttttaagtttgaaagatgcaattgcatcactcaaagatgatcccgcgttgtattagctagttggtgaggtaaaggctcaccaaggcgatgatacatagccgacctgagagggtgatcggccacattgggactgagacacggcccaaactcctacgggaggcagcagtagggaatcttcggcaatggacgaaagtctgaccgagcaacgccgcgtgagtgaagaaggttttcggatcgtaaaactctgttgttagagaagaacgacgaggagagtggaaagctcctcgtgtgacggtatct

SEQ ID NO: 8865 - DNA, 490 bp, unidentified
  misc_feature 1..490: note = Ascusbbf_1803148, encodes 16S rRNA
  source 1..490: mol_type = genomic DNA
agagtttgatcatggctcaggacgaacgctggcggcgtgcctaacacatgcaagtcgagcgaagtttttaaagtggatcccttcggggtgaaacattaactgtcttagcggcggacgggtgagtaacgcgtgagtaacctgcctttcacaaagggatagcctcgggaaactgagattaataccttacgatactcttttccagcattggagaaaagttaaagcgtaaagcggtgaaagatggtctcgcgtcccattagttagttggtgaggtaacggctcaccaagactgcgatgggtagccggcctgagagggtgaacggccacactggaactgagacacggtccagactcctacgggaggcagcagtggggaatattgcacaatggaggaaactctgatgcagcgacgccgcgtgaacgatgaaggctttcgggtcgtaaagttctgtcctaggggacgataatgacggtaccctaggaggaagccccg

SEQ ID NO: 8866 - DNA, 490 bp, unidentified
  misc_feature 1..490: note = Ascusbbf_1880175, encodes 16S rRNA
  source 1..490: mol_type = genomic DNA
agagtttgatcatggctcaggatgaacgctagctacaggcttaacacatgcaagtcgaggggcagcggggtctgtgcttgcacagaccgctggcgaccggcgcacgggtgagtaacacgtatccaacctgccatgaactccgggatagccctctgaaaggaggattaataccggatgtgacctgtgggggacatcccccgtcggttaaagattcatcggttcatgatggggatgcgtctgattagcttgttggcggggtaacggcccaccaaggcaccgatcagtaggggttctgagaggaaggtcccccacataggaactgagacacggtcctaactcctacgggaggcagcagtgaggaatattggtcaatgggcgtaagcctgaaccagccaagtagcgtgagggacgacggccctacgggttgtaaacctcttttatgcgggaataacgggagtcacgtgtgactttgtgcatgtaccgcatgaat

SEQ ID NO: 8867 - DNA, 490 bp, unidentified
  misc_feature 1..490: note = Ascusbbf_261903, encodes 16S rRNA
  source 1..490: mol_type = genomic DNA
agagtttgatcctggctcaggatgaacgctggcggcgtgcctaatgcatgcaagtcgagcgacgcatgccggaggggtaacccactggtatgacggagcggcgaacgggtgagtaacacgtgagcaacctgccccacagaccgggatagcccagggaaacctggattaataccggatatcctcgaacaacctcatggctgatcgaggaaatgcctttgtgctgtgggatgggctcgcggcttatcagctagttggtggggtaacggcctaccaaggcatcgacgagtagctggtctgagaggacgagcagccacactggaactgagacacggtccagactcctacgggaggcagcagcagggaatcttgcgcaatgggcgaaagcctgacgcagcaacgccgcgtgggggatgaaggccttcgggttgtaaacccctttcaggagggaagaaattgacggtacctccaaaagaaggaccggccaactacg

SEQ ID NO: 8868 - DNA, 490 bp, unidentified
  misc_feature 1..490: note = Ascusbbf_1487417, encodes 16S rRNA
  source 1..490: mol_type = genomic DNA
agagtttgatcatggctcaggacgaacgctggcggcgtgcctaacacatgcaagtcgaacggacgaggagagcttgctctccgagttagtggcggacgggtgagtaacgcgtgagcaacctgcctttcagtgggggacaacggttggaaacgaccgctaataccgcataatacagcgaaggggcatcccattgctgtcaaagatttattgctgaaagatgggctcgcgtctgattagatagttggtggggtaacggcctaccaagtcgacgatcagtagccggactgagaggttgaacggccacattgggactgagatacggcccagactcctacgggaggcagcagtggggaatattgggcaatgggggaaaccctgacccagcaacgccgcgtgaaggaagaaggccttcgggttgtaaacttcttttaccagggacgaaggacgtgacggtacctggagaaaaagccacggctaactacgtaccagc

SEQ ID NO: 8869 - DNA, 490 bp, unidentified
  misc_feature 1..490: note = Ascusbbf_1812282, encodes 16S rRNA
  source 1..490: mol_type = genomic DNA
agagtttgatcctggctcaggacgaacgctggcggcgtgcctaacacatgcaagtcgaacgaagctccaacactcgagttttcggacaagagtggcggaagacttagtggcggactggtgagtaacgcgtgagcaacctgccttccggtgggggacaacagttggaaacgactgctaataccgcataacatatatttaaggcatcttagatatatcaaagctttaagtgccggaagatgggctcgcgtctgattagatagttggtgaggtaacggctcaccaagtcgacgatcagtagccggactgagaggttgaacggccacattgggactgagatacggcccagactcctacgggaggcagcagtggggaatattgggcaatgggggaaaccctgacccagcaacgccgcgtgaaggaagaaggctttcgggttgtaaacttcttttatgagggacgataatgacggtacctcatgaataagccacgg

SEQ ID NO: 8870 - DNA, 490 bp, unidentified
  misc_feature 1..490: note = Ascusbbf_850799, encodes 16S rRNA
  source 1..490: mol_type = genomic DNA
agagtttgatcctggctcagattgaacgctggcggcatgcctaacacatgcaagtcgaacggcagcatgacatggtttaccatgttgatggcaagtggcgaacgggtgagtaatgcgcaggaatacgccttaaagagggggacaacctggggaaactcaggctaataccgcataatatcttcggattaaagctggggaccgtaaggcctggcgctttaagagtagcctgcgtccgattagcttgttggtgaggtaaaggcttaccaaggcgacgatcggtagctggtctgagaggatgatcagccacactgggactgagacacggcccagactcctacgggaggcagcagtggggaatattggacaatgggggaaaccctgatccagcaatgccgcgtgtgtgaagaaggcctgagggttgtaaagcactttcagtggggaggaggcttcgaaggttaagagctattgaagtggacgttacccacagaag

SEQ ID NO: 8871 - DNA, 490 bp, unidentified
  misc_feature 1..490: note = Ascusbbf_1167070, encodes 16S rRNA
  source 1..490: mol_type = genomic DNA
agagtttgatcctggctcaggatgaacgctggcggcgtgcataacacattcaagtcgaacgaagcatagggaacggagccttcgggcgaagagaactatgacttagtggcggacgggtgagtaacgcgtgagcaaccttcctgcctgtgagggataacacagggaaacttgtgctaataccgcatgacgcatgattgccgcatgacagacatgccaaagatatattgcaggcagatgggctcgcgtctgattagatagttggcagggtaacggcctaccaagtcgacgatcagtagccggactgagaggttgaacggccacattggaactgagagacggtccagactcctacgggaggcagcagtggggaatattgggcaatgggcgaaagcctgacccagcgacgccgcgtgagggaagaaggtcttcggattgtaaacctctttcagcaaggaagaagaaagtgacggtacttgcagaagaagccacg

SEQ ID NO: 8872 - DNA, 490 bp, unidentified
  misc_feature 1..490: note = Ascusbbf_1570754, encodes 16S rRNA
  source 1..490: mol_type = genomic DNA
agagtttgatcatggctcaggatgaacgctggcggcgtgcttaacacatgcaagtcgaacgatgaagctgcctgcttgcaggtggtggattagtggcgaacgggtgagtatcacgtgagtaacctgcccttgactctgggataagcccgggaaactgggtctaataccggatatgacctctcatcgcatggtggggggtggaaagtttttaacggtcttggatgggctcgcggcctatcagcttgacggtggggtagtggcctaccgtggctttgacgggtagccggcctgagagggtgaccggccacactgggactgagacacggcccagactcctacgggaggcagcagtggggaatattgcacaatgggcgcaagcctgatgcagcgacgccgcgtgcgggatgacggccttcgggttgtaaaccgctttcagcagggaagaagggcctcttttggaggtttgacggtacttgcagaagaagcgccg

SEQ ID NO: 8873 - DNA, 472 bp, unidentified
  misc_feature 1..472: note = Ascusbbf_742533, encodes 16S rRNA
  source 1..472: mol_type = genomic DNA
agagtttgatcctggctcagaacgaacgctggcggcaggcctaacacatgcaagtcgaacggttgtagcaatacagccgtggcgcacgggtgagtaacgcgtgggaacgtgcccttgggtatggaataacagcgggaaactgctgacaataccatatgatgtcttcggaccaaagatttatcgcccagggatcggcccgcgtcagattagctagttggtggggtaatggcctaccaaggctccgatctgtagctgttctgagaggaagaccagccacactgaaactgagacacggttcagactcctacgggaggcagcagtggggaatattggacaatgggggaaaccctgatccagccatgccgcgtgagtgatgaaggccttagggttgtaaagctcttttaccagggaagatgatgacggtacctggagaataagcaccggctaacttcgtgccagcagccgcggtaat

SEQ ID NO: 8874 - DNA, 490 bp, unidentified
  misc_feature 1..490: note = Ascusbbf_1043060, encodes 16S rRNA
  source 1..490: mol_type = genomic DNA
agagtttgatcctggctcaggacgaacgctggcggcgtgcctaacacatgcaagtcgaacggaactctttggaacaaggcttcggccgagggaatttgagtttagtggcggacgggtgagtaacgcgtgagcaacctgcccttcggagggggacaacagttggaaacgactgctaataccgcatgacatacattggttgcatgatcgatgtatcaaagattttatcgccgagggatgggctcgcgtctgattagctagttggtagggtaacggcttaccaaggcgacgatcagtagccggactgagaggttgaacggccacattgggactgagatacggcccagactcctacgggaggcagcagtggggaatattgggcaatgggggcaaccctgacccagcaacgccgcgtgaaggaagaaggctttcgggttgtaaacttcttttatcagggacgataacgacggtacctgatgaataagccacggct

SEQ ID NO: 8875 - DNA, 490 bp, unidentified
  misc_feature 1..490: note = Ascusbbf_1883069, encodes 16S rRNA
  source 1..490: mol_type = genomic DNA
agagtttgatcatggctcaggatgaacgctggcggcgtgcctaacacatgcaagtcgaacgaagcatattggaatgagacttcggtcaaaggaaggtatgacttagtggcggacgggtgagtaacgcgtgagcaacctgcctcagagtgggggacaacagctggaaacggctgctaataccgcatgacattacttgaaggcatcttcgggtaatcaaagctctatgtgctctgagatgggctcgcgtctgattagctagatggtgaggtaacggctcaccatggcgacgatcagtagccggactgagaggttgaacggccacattgggactgagatacggcccagactcctacgggaggcagcagtggggaatattggtcaatgggggaaaccctgaaccagcaacgccgcgtgaaggaagaaggctttcgggttgtaaacttcttttatctgagacgatagtgacggtatcagatgaataagctacggc

SEQ ID NO: 8876 - DNA, 490 bp, unidentified
  misc_feature 1..490: note = Ascusbbf_1109244, encodes 16S rRNA
  source 1..490: mol_type = genomic DNA
agagtttgatcatggctcgggatgaacgctagcggcaggcttaacacatgcaagtcgaggggtaacgcggggtagcaatactctggcgacgaccggcgcacgggtgcgtaacgcgtatgcaacctacctgtaacaggggtataacggagagaaatttccactaatcccccatattgttagagattcgcatgtttctctaacgaaagcttcggtggttacggatgggcatgcgtgacattagctagttggtaaggtaacggcttaccaaggcgacgatgtctaggggagctgagaggcttatcccccacactggtactgagacacggcccagactcctacgggagacagcagttaggaatattcgtcaatgggggaaaccctgaacgagcaatgccgcgtgaaggatgacggtcctatggattgtaaacttcagttgttagggaagaacgactagtataggaaatgatactagagtgacggtacctttcaa

SEQ ID NO: 8877 - DNA, 490 bp, unidentified
  misc_feature 1..490: note = Ascusbbf_1000424, encodes 16S rRNA
  source 1..490: mol_type = genomic DNA
agagtttgatcatggctcaggacgaacgctggcggcgtgcttaacacatgcaagtcgaacgagggatacggaagagcttgctcggaagtatcccgagtggcggacgggtgagtaacgcgtgaacaatctgtctcggacagggggataacgcaccgaaaggcgtgctaataccgcataagaccacgagggggcatccccatgaggtcaaaggagcgatccggtccgaggtgagttcgcgtctgattagatagttggtgaggtaacggcccaccaagtcaacgatcagtagccgacctgagagggtgatcggccacattgggactgagacacggcccagactcctacgggaggcagcagtggggaatattgggcaatgggcgcaagcctgacccagcaacgccgcgtgagggaagaaggttttcggattgtaaacctctgtcctacatgaagaggagaagacggtagtgtaggaggaagccccggctaacta

SEQ ID NO: 8878 - DNA, 490 bp, unidentified
  misc_feature 1..490: note = Ascusbbf_1797758, encodes 16S rRNA
  source 1..490: mol_type = genomic DNA
agagtttgatcctggctcaggacgaacgctggcggcgtgcttaacacatgcaagtcgaacggggtcataaggaagcttgcttttttgtgacttagtggcggacgggtgagtaacgcgtgaggaacctgtcttcatcagggggataacgttccgaaagggatgctaataccgcataagaccacatgatcgcatgatcgaggggtcaaaggaggaatccggatgaaggtggcctcgcgtcccattaggcagttggcggggtaacagcccaccaaaccgacgatgggtagccgacctgagagggtgatcggccacattggaactgagagacggtccaaactcctacgggaggcagcagtggggaatattgggcaatgggcgaaagcctgacccagcaacgccgcgtgagggaagaaggttttcggattgtaaacctctgtccttcaagacgaggagaagacggtattgaaggaggaagccccggctaactacg

SEQ ID NO: 8879 - DNA, 490 bp, unidentified
  misc_feature 1..490: note = Ascusbbf_1043134, encodes 16S rRNA
  source 1..490: mol_type = genomic DNA
agagtttgatcctggctcaggataaacgctggcggcgcacataagacatgcaagtcgaacggaagtcgttgtaatgatatcgacatggacggagaacttgttcaaagaaagtgaaaattgacttacaacaatggctttagtggcggactggtgagtaacacgtaagcaacctgcctatcagaggggaacaacagttagaaatgactgctaataccgcatatgcctaagtatcacatgatacaatagggaaaggagcaatccgctgatagatgggcttgcgtctgattagatagttggtggggtagcggcctaccaagtcgacgagcagtagccggaccgagaggttgaacggccatattgggactgagacacggcccaaactcctacgggaggcagcagtggggaatattgcacaatgggcgaaagcctgatgcagcgacgccgcgtgagcgaagaagtatttcggtatgtaaagctctatcagcaggga

SEQ ID NO: 8880 - DNA, 490 bp, unidentified
  misc_feature 1..490: note = Ascusbbf_727258, encodes 16S rRNA
  source 1..490: mol_type = genomic DNA
agagtttgatcatggctcaggatgaacgctggcggcgcgcctaacacatgcaagtcgaacggtgaagtcccttcgggggcggatcagtggcggacgggtgagtaacgcgtgagtaacctgcccttacgagcggaataacgtccggaaacagacgctaataccgcatgacacgtgcttccggcatcggaggcacgtcaaagatttatcgcgtaaggatggactcgcgtcccattagatagttggcggggcaacggcccaccaagtcagcgatgggtagccggactgagaggttgaacggccacattggaactgagagacggtccagactcctacgggaggcagcagtggggaatattgggcaatgggcgaaagcctgacccagcgacgccgcgtgagcgaagaaggtcttcggattgtaaagctctgttgacagggacgaaaaaatgacggtacctgtcgaggaagccacggctaactacgtgccagcagc

SEQ ID NO: 8881 - DNA, 490 bp, unidentified
  misc_feature 1..490: note = Ascusbbf_310914, encodes 16S rRNA
  source 1..490: mol_type = genomic DNA
agagtttgatcctggctcaggataaacgctagcggcaggcctaacacatgcaagtcgagcggcagcggggtgtagcaatacattgccggcgagcggcggacgggtgagtaacgcgtatgcaacctgcccaccactcggagatagccgaccgaaaggacgattaaactccgatggcatcatagagcggcatcgctttatgattaaatatttataggtggtggatgggcatgcgtggcattagttagttggcggggcaacggcccaccaagacagtgatgcctatgggttctaaaaggaagatcccacacatcggtactgagacacggaccgaactcctacgggaggcagcagtgaggaatattggacaatgggggcaaccctgatccagccaaaccgcgtgggggaaggaggtcgttaagatcgtaaaccccttttatatgggagcaatccatcctatgtataggatgttgagagtaccatttgaataagc

SEQ ID NO: 8882 - DNA, 490 bp, unidentified
  misc_feature 1..490: note = Ascusbbf_1736022, encodes 16S rRNA
  source 1..490: mol_type = genomic DNA
agagtttgatcctggctcaggatgaacgctggcggcgtgcctaacacatgcaagtcgaacggaacttcttacgagcaagacttcggtcaagcaagttttaagtttagtggcggacgggtgagtaacgcgtgagcaacctgcctttcagagggggataacgtttggaaacgaacgctaataccgcataacgtagcagtaccgcatgatacagctaccaaagattttatcgctgagagatgggctcgcgtccgattaggtagttggtgaggtaacggcccaccaagccgacgatcggtagccggactgagaggttgaacggccacattgggactgagacacggcccagactcctacgggaggcagcagtggggaatattgcacaatgggcgcaagcctgatgcagcaacgccgcgtgagggaagacggttttcggattgtaaacctctgtctttggtgacgaagaagtgacggtagccaaggaggaagccac

SEQ ID NO: 8883 - DNA, 490 bp, unidentified
  misc_feature 1..490: note = Ascusbbf_1834369, encodes 16S rRNA
  source 1..490: mol_type = genomic DNA
agagtttgatcatggctcaggatgaacgctggcggcgtgcctaacacatgcaagtcgagcgggaagccataaagcagagattcgtcgaagcgatatggtggatagcggcggacgggtgagtaacgcgtaggtaacctacccttatctgcgggatagcctagggaaacctggattaataccgcataatatgacggattcacatgaatttgtcgtcaaagatttatcggataaggatggacctgcgtctgattaggtagttggtgaggtaacggctcaccaagcctacgatcagtagccgacctgagagggtaatcggccacattggaactgagacacggtccaaactcctacgggaggcagcagtggggaatattgcacaatgggggaaaccctgatgcagcaacgccgcgtgaacgatgaaggtcttcggattgtaaagttctgtccttagggaagaagaaagtgacggtacctgaggaggaagccccgg

SEQ ID NO: 8884 - DNA, 490 bp, unidentified
  misc_feature 1..490: note = Ascusbbf_1456746, encodes 16S rRNA
  source 1..490: mol_type = genomic DNA
agagtttgatcatggctcaggataaacgctagcggcaggcctaacacatgcaagtcgagcggcagcgcggagtggcaacactttggcggcgagcggcggacgggtgagtaacgcgtatgcaacctgcccaccacacggggatagccgaccgaaaggacgattaacccccgatggcatcatggtcccgcatgggatcatgattaaatattcataggtggtggatgggcatgcgtggcattagttagttggcggggcaacggcccaccaagacgatgatgcctatgggttctaaaaggaagatcccacacatcggtactgagacacggaccgaactcctacgggaggcagcagtgaggaatattggacaatgggggcaaccctgatccagccaaaccgcgtgagggaaggaggtcgttaagatcgtaaacctcttttatatgggaataatcgcccccacgtgctgggggtttgaatgtaccatttgaataag

SEQ ID NO: 8885 - DNA, 490 bp, unidentified
  misc_feature 1..490: note = Ascusbbf_737306, encodes 16S rRNA
  source 1..490: mol_type = genomic DNA
agagtttgatcctggctcaggatgaacgctggcggcgtgcataacacattcaagtcgaacggtgaagcgccttcgggtgcggatcagtggcggacgggtgagtaacgcgtgagcaacctgccgtataatgggggataacacagggaaacttgtgctaataccgcatgacacacggagatcgcatggtatctgtgtcaaagatttattgctgtacgatgggctcgcgtatgattagacagttggcagggtaacggcctaccaaatcaacgatcattagccgaactgagaggttgaacggccacattggaactgagaaacggtccagactcctacgggaggcagcagtggggaatattgggcaatgggcgaaagcctgacccagcgacgccgcgtgagggaagaaggtcttcggattgtaaacctctttcagcagggaagaatcgatgacggtacctgactaagaagccccggctaactacgtgccagcagc

SEQ ID NO: 8886 - DNA, 487 bp, unidentified
  misc_feature 1..487: note = Ascusbbf_1553433, encodes 16S rRNA
  source 1..487: mol_type = genomic DNA
agagtttgatcctggctcagaacgaacgctggcgacatgttttaggcatgcaagtcgaacggaatttatttttagtggcgaaagggtgagtaacacgtgagtaatctgcccctgagttcggaataacagttagaaatgactgctaataccggatgtggctataggaacgcatgtttttatggctaaagatttatcattcagagatgagctcgcgccccattagctagttggtgaggtaacggcccaccaaggcaacgatgggtagctggtctgagaggatggtcagccacactgggactgagacactgcccagactcctacgggaggctgcagtcgagaatcttgggcaatgcacgaaagtgtgacccagcaatgtcgcgtgcgggatgaatgttttaggatagtaaaccgctgtcactcgggacgaatcattgacggtactgagagaggaagccacggctaactacgtgccagcagccgcggtaat

SEQ ID NO: 8887 - DNA, 490 bp, unidentified
  misc_feature 1..490: note = Ascusbbf_717349, encodes 16S rRNA
  source 1..490: mol_type = genomic DNA
agagtttgatcatggctcaggatgaacgctggcggcgtgcttaacacatgcaagtcgaacggagttgccttttcagatttcttcggattgacgagttggtatacttagtggcggacgggtgagtaacgcgtgagcaacctgccttttagtggggaataacggctggaaacggtcgctaataccgcataatatgtatttatcgcatgttagatacattaaagatttatcgctagaagatgggctcgcgtccgattagctagttggtgagataacagctcaccaaggcgacgatcggtagccggactgagaggttgaacggccacattgggactgagacacggcccagactcctacgggaggcagcagtggggaatattgcacaatgggcgcaagcctgatgcagcaacgccgcgtgaaggaagacggtcttcggattgtaaacttttgtccttagcaacgaaacaaatgacggtagctttggaggaagcca

SEQ ID NO: 8888 - DNA, 490 bp, unidentified
  misc_feature 1..490: note = Ascusbbf_1469993, encodes 16S rRNA
  source 1..490: mol_type = genomic DNA
agagtttgatcatggctcaggacgaacgctggcggcgtgcctaatacatgcaagtcgagcgggcccttcggggccagcggcggacgggtgagtaacacgtaggcaacctgcccgaaagaccgggataactggcggaaacgtcagctaataccggataggaggaagcaaggcatcttgctttctggaaaggcggagcttttctgtcactttcggatgggcctgcggcgcattagctagtaggcggggtaacggcccacctaggcgacgatgcgtagccgacctgagaaggtgatcggccacactgggactgagacacggcccagactcctacgggaggcagcagtagggaatcttccgcaatgggcgaaagcctgacggagcatcgccgcgtgagtgaagaaggtcttcggatcgtaaagctctgttgccggagaagaacggcctggagagtgactgctccaggagtgacggtatccgagaagaaagcccc

SEQ ID NO: 8889 - DNA, 490 bp, unidentified
  misc_feature 1..490: note = Ascusbbf_436848, encodes 16S rRNA
  source 1..490: mol_type = genomic DNA
agagtttgatcatggctcaggataaacgctggcggcgtgcctaatgcatgcaagtcgcacgggagcccttcggggtcgaccgtggcggacgggtgaggaacgcgtggctaacctgcccaaccgagggggataaccccgggaaaccggggctaataccgcatacgctcagtggaggggacttcattgaggaaagggagcaatcccgcggatggagggggctgcggccgattagctagttggtggggtaagagcctaccaaggcggtgatcggtagctggtctgagaggacgatcagccacacggggactgagacacggccccgactcctacgggaggcagcagcaaggaattttccacaatgggcgcaagcctgatggagcaacgtcgcgtgggggatgacgcgtttcggcgtgtaaaccccttttcgagaggacgaaggcaatgacggtactctcggaataaggaccggctaactacgtgccagcagccg

SEQ ID NO: 8890 - DNA, 488 bp, unidentified
  misc_feature 1..488: note = Ascusbbf_1805340, encodes 16S rRNA
  source 1..488: mol_type = genomic DNA
agagtttgatcatggctcaggactaacgctggcggcgtgcctaacacatgcaagtcgaacgaagcagcaatgcttagtggcagacgggtgagtaacgcgtagataatgtgccctcttgcgggggataccgtttcgaaaggaacgttaataccgcataaagtccttaggaggcatctccctaggaccaaacttccggggcgggaggagcaatctgcgtactatcagctagttggtgaggtaatggctcaccaaggctacgacggttaactggtctgagaggatgatcagtcacactggaactgagacacggtccagactcctacgggaggcagcagtgaggaatattgcgcaatgggcgaaagcctgacgcagcgacgccgcgtggaggatgacggatttcggtctgtaaactcctgtcagtagggaagagaatggacggtacctactgaggaagcttcggctaactacgtgccagcagccgcggtaat

SEQ ID NO: 8891 - DNA, 490 bp, unidentified
  misc_feature 1..490: note = Ascusbbf_1401288, encodes 16S rRNA
  source 1..490: mol_type = genomic DNA
agagtttgatcatggctcaggatgaacgctggcggcgtgcttaacacatgcaagtcgaacgaagcataagagttgctcgcaacacttatgacttagtggcagacgggtgagtaacgcgtgggtaacctaccctgtacagggggttaacagttagaaatgactgctaataccgcataagcacacactgtcacatgacagagggtgaaaagatttatcggtacaggatgggcccgcgtctgattagctagttggtgaggtaaaggcttaccaaggcgacgatcagtagccggcttgagagagtgaacggccacattggaactgagacacggtccaaactcctacgggaggcagcagtggggaatattgcacaatgggggaaaccctgatgcagcgacgccgcgtgaaggatgaagtatttcggtatgtaaacttctatcagcagggaagataatgacggtacctgactaagaagccccggctaactacgtgc

SEQ ID NO: 8892 - DNA, 490 bp, unidentified
  misc_feature 1..490: note = Ascusbbf_967195, encodes 16S rRNA
  source 1..490: mol_type = genomic DNA
agagtttgatcatggctcaggatgaacgctggcggcgtgcctaacacatgcaagtcgagcgagaagctcacgagttgatacttcggttgaaacatgtgagtggaaagcggcggacgggtgagtaacgcgtaggcaacctgcccttagcagagggatagcctcgggaaaccgggattaaaacctcataatacggagagaagacatcttcatttcgtcaaagatttatcggctaaggatgggcctgcgtctgattagttagttggtggggtaacggcctaccaaggcaacgatcagtagccgacctgagagggtgataggccacattggaactgagacacggtccaaactcctacgggaggcagcagtggggaatattgcacaatgggggaaaccctgatgcagcaacgccgcgtgaaggatgaaggcccttgggtcgtaaacttctgttctaagggaagataatgacggtaccttaggagcaagtcccggc

SEQ ID NO: 8893 - DNA, 490 bp, unidentified
  misc_feature 1..490: note = Ascusbbf_1463735, encodes 16S rRNA
  source 1..490: mol_type = genomic DNA
agagttgatcatggctcaggatgaacgctggcggcgtgcttaacacatgcaagtcgaacggaactcagaggaagagagacttcggtcaaacggagactgagtttagtggcggacgggtgagtaacgcgtgagcaacctgcctttcagagggggataacgtttggaaacgaacgctaataccgcataatacagagagttcgcatggacactctgtcaaagatttaatcgctgaaagatgggctcgcgtccgattaggcagttggtgaggtaacggctcaccaaaccgacgatcggtagccggactgagaggttgaacggccacattgggactgagacacggcccagactcctacgggaggcagcagtggggaatattgcacaatggggggaaccctgatgcagcaacgccgcgtgaaggaagacggttttcggattgtaaacttctgttcttagtgacgaagaagtgacggtagctaaggagcaagccacg

SEQ ID NO: 8894 - DNA, 490 bp, unidentified
  misc_feature 1..490: note = Ascusbbf_1600727, encodes 16S rRNA
  source 1..490: mol_type = genomic DNA
agagtttgatcctggctcaggatgaacgctggcggcgtgcttaacacatgcaagtcgaacgaagatatatcagcagaggccttcgggcggaagcagatatattcttagtggcggacgggtgagtaacgcgtggagaacctgccgtatgcagggggacaacacctggaaacgggtgctaataccgcataagcgcacatgatagcattatcaagtgtgaaaagctttagcggcatacgatggctccgcgtctgattagccagttggcggggtaacggcccaccaaagcgacgatcagtagccggcctgagagggtgaacggccacattgggactgagacacggcccagactcctacgggaggcagcagtgggggatattgcacaatgggggaaaccctgatgcagcgacgccgcgtgagtgaagaagtatttcggtatgtaaagctctatcagcagggaagaagatgacggtacctgcacaagaagtcccgg

SEQ ID NO: 8895 - DNA, 490 bp, unidentified
  misc_feature 1..490: note = Ascusbbf_1867349, encodes 16S rRNA
  source 1..490: mol_type = genomic DNA
agagtttgatcatggctcaggacgaacgctggcggcgtgcttaacacatgcaagtcgaacgagggtatgggaagagcttgctcagaacatacccgagtggcggacgggtgagtaacgcgtgaggaacctgtcttacacagggggataacgccccgaaaggggtgctaataccgcataagaccacagcaccgcatggtggaggggtcaaaggagcaatccggtgtaaggtggcctcgcgtcccattaggcagttggcgaggtaacggctcaccaaaccgacgatgggtagccgacctgagagggtgatcggccacattggaactgagagacggtccaaactcctacgggaggcagcagtggggaatattgggcaatgggcgcaagcctgacccagcaacgccgcgtgagggaagaaggttttcggattgtaaacctctgtcctcaatgaaaaggagaagatggtaattgaggaggaagccccggctaacta

SEQ ID NO: 8896 - DNA, 490 bp, unidentified
  misc_feature 1..490: note = Ascusbbf_762914, encodes 16S rRNA
  source 1..490: mol_type = genomic DNA
agagtttgatcatggctcaggacgaacgctggcggcatgcctaacacatgcaagtcgaacggagtaagagagaagcttgcttagctcttacttagtggcggacgggtgagtaacgcgtgagtaacctgcctttcagagggggataacgttctgaaaagaacgctaataccgcatgatatattggggtcgcatggccttgatatcaaaggagcaatccgctgaaagatggactcgcgtccgattagccagttggcggggtaaaggcccaccaaagcgacgatcggtagccgggttgagagactgaacggccacattgggactgagacacggcccagactcctacgggaggcagcagtgggggatattgcacaatggaggaaactctgatgcagcaatgccgcgtgagggaagacggtcttcggattgtaaacctctgtccttggtgaagataatgacggtagccaaggaggaagctccggctaactccgtg

SEQ ID NO: 8897 - DNA, 490 bp, unidentified
  misc_feature 1..490: note = Ascusbbf_1542721, encodes 16S rRNA
  source 1..490: mol_type = genomic DNA
agagtttgatcctggctcaggatgaacgctggcggcgtgcttaacacatgcaagtcgaacgattaaagcaccttcgggtgtgtatagagtggcgaacgggtgagtaacacgtgggtaacctaccttttacactgggatagctcagggaaacttgaattaataccagatactccttttctgacgcatgtcagattcgggaaagcttttgcggtaaaagatggacccgcggcccattagttagttggtgaggtaatggctcaccaagacagcgatgggtagccgagctgagaggctgatcggccacattgggactgagacacggcccaaactcctacgggaggcagcagtggggaattttgcgcaatgggcgaaagcctgacgcagcaacgccgcgtggatgatgaaggccttcgggttgtaaagtcctttcaatagtgatgaaaatgacagtagctatagaagaagccccggctaaatacgtgccagcagc

SEQ ID NO: 8898 - DNA, 490 bp, unidentified
  misc_feature 1..490: note = Ascusbbf_1232461, encodes 16S rRNA
  source 1..490: mol_type = genomic DNA
agagtttgatcatggctcaggacgaacgctggcggcgtgcctaacacatgcaagtcgaacgggaatctttgaaatgaagcttcggcagattttcaaagaggatagtggcggacgggtgagtaacgcgtgagtaacccgccgagaagagggggacaacacatcgaaaggtgtgctaataccgcatattgaatatttatcgcatgatagatatttgaaagatttatcgcttcttgatggactcgcgtctgattagatagttggtggggtaacggcccaccaagtcgacgatcagtagccggactgagaggttgaacggccacattgggactgagacacggcccagactcctacgggaggcagcagtggggaatattgcgcaatgggggcaaccctgacgcagcaacgccgcgtgaaggaagaaggtcttcggattgtaaacttttgtctttggtgaagataatgacggtagccaaggaggaagccacggcta

SEQ ID NO: 8899 - DNA, 490 bp, unidentified
  misc_feature 1..490: note = Ascusbbf_1357923, encodes 16S rRNA
  source 1..490: mol_type = genomic DNA
agagtttgatcctggctcaggacgaacgctggcggcgtgcctaatacatgcaagtcgagcggagcttagccttcctttggaaggctctggcttagcggcggacgggtgagtaacacgtaggcaacctgcccgtaagaccgggataacttgcggaaacgtgagctaataccggatagataggaagagcgcatgctcttcttaggaaagacggagcaatctgtcacttacggatgggcctgcggcgcattagctagttggtggggtaaaggcctaccaaggcgacgatgcgtagccgacctgagagggtgaccggccacactgggactgagacacggcccagactcctacgggaggcagcagtagggaatcttcggcaatggacggaagtctgaccgagcaacgccgcgtgagtgaagaaggttttcggatcgtaaaactctgttgccagagaagaaagctaaggagagtcactgctctttggttgacggta

SEQ ID NO: 8900 - DNA, 312 bp, unidentified
  misc_feature 1..312: note = Ascusbbf_1482722, encodes 16S rRNA
  source 1..312: mol_type = genomic DNA
agagtttgatcatggctcaggatgaacgctggcggcgtgcctaacacatgcaagtcgaacgaagcatacggaccggagattcgtcgaaggaccgcatgacttagtggcggacgggtgagtaatgtatgagcaacctgcctttcagaggaggcagcagtggggaatattgggcaatgggcgaaagtctgacccagcaacgccgcgtgaaggaagaaggtcttcggattgtaaacttcttttatgagggacgaaggacgtgacggtacctcatgaataagccacggctaactacgtgccagcagccgcggtaat

SEQ ID NO: 8901 - DNA, 485 bp, unidentified
  misc_feature 1..485: note = Ascusbbf_1363276, encodes 16S rRNA
  source 1..485: mol_type = genomic DNA
agagtttgatcctggctcagaatgaacgctggcggcaggcctaacacatgcaagtcgaacgggatcttcggatctagtggcggacgggtgagtaacgcgtgggaatatgccctttggtacggaatagcctcgggaaactgagagtaataccgtatgtgtcctttgattgtggtgatcgaaggagaaagatttatcgccaaaggattagcccgcgttggattagatagttggtggggtaatggcctaccaagtctacgatccatagctggtttgagaggatgatcagccacactgggactgagacacggcccagactcctacgggaggcagcagtggggaatcttagacaatgggggaaaccctgatctagccatgccgcgtgatcgatgaaggccttagggttgtaaagatctttcagttgggaagataatgacggtaccaacagaagaagccccggctaactccgtgccagcagccgcggtaat

SEQ ID NO: 8902 - DNA, 490 bp, unidentified
  misc_feature 1..490: note = Ascusbbf_1668055, encodes 16S rRNA
  source 1..490: mol_type = genomic DNA
agagtttgatcatggctcaggatgaacgctggcggcgtgcctaacacatgcaagtcgagcgggaatctctaaagcagcttgctgcggaagagaggatagcggcggacgggtgagtaacgcgtaggtaagctgccccttgcagaaggatagcctcgggaaactgggattaatacttcataacacggctggtccgcatgaaccggccgtcaaagatttatcggcaagggatgcacctgcgtctgattagatagttggtagggtaacggcctaccaagtcaacgatcagtagccgacctgagagggtaatcggccacattggaactgagacacggtccaaactcctacgggaggcagcagtggggaatattgcacaatgggggaaaccctgatgcagcaacgccgcgtgagtgaagaaggtcttcggattgtaaagctctgttcttgggaaagaaagaatgacggtacccaaggagaaagccccggctaacta

SEQ ID NO: 8903 - DNA, 490 bp, unidentified
  misc_feature 1..490: note = Ascusbbf_390307, encodes 16S rRNA
  source 1..490: mol_type = genomic DNA
agagtttgatcatggctcaggatgaacgctggcggcgcgcataacacatgcaagtcgaacggagccacattgaaacctagtgatgtgtgacttagtggcggacgggtgagtaacgcgtgggtaacctacctggtattgggggacaacagttagaaatgactgctaataccgcatacgtcatccggaaggcatcttccggatgggaaaggatttatccgatatcagatggacccgcgtctgattagctggttggcggggtaacggcccaccaaggcgacgatcagtagccgaactgagaggttgaccggccacattgggactgagacacggcccaaactcctacgggaggcagcagtggggaatattgcacaatggggggaaccctgatgcagcgacgccgcgtgagtgatgaagtatttcggtatgtaaagctctatcgatggggaagaaaatgacggtacccaagtaagaagccccggctaactacgtg

SEQ ID NO: 8904 - DNA, 483 bp, unidentified
  misc_feature 1..483: note = Ascusbbf_906641, encodes 16S rRNA
  source 1..483: mol_type = genomic DNA
agagtttgatcctggctcagaacgaacgctggcggcaggcttaacacatgcaagtcgaacgctccgcaaggagagtggcagacgggtgagtaacgcgtgggaacgtaccctttactacggaacagctccgggaaactggaattaataccgtatgtgcccccctttggtggacattgggggggaaagatttatcggtaaaggatcggcccgcgttggattagctagttggtggggtaaaggccaaccaaggcgacgatccatagctggtctgagaggatgatcagccacattgggactgagacacggcccaaactcctacgggaggcagcagtggggaatattggacaatgggcgcaagcctgatccagccatgccgcgtgagtgatgaaggccttagggttgtaaagctctttcaccggtgaagataatgacggtaaccggagaagaagccccggctaacttcgtgccagcagccgcggtaat

SEQ ID NO: 8905 - DNA, 490 bp, unidentified
  misc_feature 1..490: note = Ascusbbf_1862300, encodes 16S rRNA
  source 1..490: mol_type = genomic DNA
agagtttgatcatggctcaggatgaacgctggcggcgtgcctaacacattcaagtccaacggagaagggagcttcggctcccggatcagtggcggacgggtgagtaacgcgtgagcaacctgccttcgtgtggggaataacacagggaaacttgtgctaataccgcataatgcaaagacgcagcattgagtttttgccgaagatttatcgcacgaagatgggctcgcgtctgattagatagttggtgaggtaacggctcaccaagtcgacgatcagtagccggactgagaggttgaacggccacattggaactgagagacggtccagactcctacgggaggcagcagtggggaatattgggcaatgggcgaaagcctgacccagcgacgccgcgtgaaggaagaaggccttcgggttgtaaacttcagtcaacagggaagaagaaagtgacggtacctgtggaggaagccacggctaactacgtgccagc

SEQ ID NO: 8906 - DNA, 490 bp, unidentified
  misc_feature 1..490: note = Ascusbbf_871589, encodes 16S rRNA
  source 1..490: mol_type = genomic DNA
agagtttgatcatggctcaggatgaacgctggcggcatgcctaacacatgcaagtcgaacggagtgcttgtagaagccttttcggaagtggaaataagttacttagtggcggacgggtgagtaacgcgtgggcaacctgccctgtacagggggatacctaccggaaacggtagctaataccccataagcgcacgatatcgcatgataaagtgtgaaaagccataacggtacaggatgggcccgcgtccgattagccagttggcggggtaacggcccaccaaagcgacgatcggtagccggcttgagagagtgaacggccacattgggactgagacacggcccagactcctacgggaggcagcagtggggaatattgcacaatgggggaaaccctgatgcagcaatgccgcgtgaaggaagaagtatttcggtatgtaaacttctatcagcagggaagaaaatgacggtacctgactaagaagccccggct

SEQ ID NO: 8907 - DNA, 488 bp, unidentified
  misc_feature 1..488: note = Ascusbbf_729786, encodes 16S rRNA
  source 1..488: mol_type = genomic DNA
agagtttgatcctggctcagaacgaacgctggcggcatggattaggcatgcaagtcgaacggtgtagcaatacacagtggcggaagggtgaggaacacgtgaataatctgccctcaagttgggaataactttccgaaaggaaagctaataccgaatgtggttgttttatcgcatgataggacaactaaagatttatcgcttgaggatgagttcgcgtcccattagctagttggcggggtaacggcccaccaaggcagagatgggtagctggtctgagaggatgatcagccacactgggactgagacactgcccagactcctacgggaggctgcagtcgagaatcttttgcaatgcgcgaaagcgtgacaaagcaatgccgcgtgccggatgaaggtcttcggattgtaaacggctgtcactcgggacgaaaaatgacggtaccgagggaggaagccacggctaactacgtgccagcagccgcggtaat

SEQ ID NO: 8908 - DNA, 490 bp, unidentified
  misc_feature 1..490: note = Ascusbbf_1295997, encodes 16S rRNA
  source 1..490: mol_type = genomic DNA
agagtttgatcctggctcaggatgaacgctagcggcaggcttaacacatgcaagtcgaggggcagcgcggagtagcaatactctggcggcgaccggcggaagggtgcgtaacgcgtgagcaacctgcccgtaaccgggacataaccgatggaaacgtcgcctaatttcccataataacggaagtggcatcacttcagtttgaaagcttcggtggttacggatgggctcgcgtgacattagctggttggtagggtaacggcctaccaaggcgacgatgtctaggggttctgagaggaaggtcccccacactggaactgagacacggtccagactcctacgggaggcagcagtgaggaatattggtcaatgggcggaagcctgaaccagccatgccgcgtgcaggaataaggccctatgggtcgtaaactgcttttgtgcgggagcaataagttgcacgtgtgcaatgatgagagtaccatgagaataagca

SEQ ID NO: 8909 - DNA, 490 bp, unidentified
  misc_feature 1..490: note = Ascusbbf_662842, encodes 16S rRNA
  source 1..490: mol_type = genomic DNA
agagtttgatcatggctcaggatgaacgctggcggcgtgcctaatacatgcaagtcgagcgagaagtttctgattgacgcttcggttgatttcagaaatggaaagcggcggacgggtgagtaacgcgtaggcaacctgccccagacagagggatagcctcgggaaaccgggattaagacctcataatgcatcgagatcacatgttcacgatgccaaagatttatcggtctgggatgggcctgcgtctgattagttagttggtgaggtaacggcccaccaagacagcgatcagtagccgacctgagagggtgatcggccacattggaactgagacacggtccagactcctacgggaggcagcagtagggaatattgcacaatgggggaaaccctgatgcagcaacgccgcgtgaaggatgaaggcccttgggtcgtaaacctctgtccttggggaagaagaaagtgacggtacccttggaggaagccccgg

SEQ ID NO: 8910 - DNA, 179 bp, unidentified
  misc_feature 1..179: note = Ascusbbf_579330, encodes 16S rRNA
  source 1..179: mol_type = genomic DNA
agagtttgatcatggctcagagagtttgatcatggccagcagccgcggtaataccagcagccgcggtaatgccagcagccgcggtaatgccagcagccgcggtaatgccagcagccgcggtaatgccagcagccgcggtaatagagtttgatcctggctcagccagcagccgcggtaat

SEQ ID NO: 8911 - DNA, 474 bp, unidentified
  misc_feature 1..474: note = Ascusbbf_541640, encodes 16S rRNA
  source 1..474: mol_type = genomic DNA
agagtttgatcatggctcagagcgaacgctggcggcatgcttaacacatgcaagtcgcgcgggtggtttcggccatcagcggcggacgggtgagtaacgcgtaggaatgtatcctgaggtgggggacaaccctgggaaactggggctaataccgcatgggagctgaggctcaaagccgtgaggcgccttgggagcagcctgcgtccgattaggtagttggtggggtaaaggcctaccaagcctgcgatcggtagctggtctgagaggacgatcagccacactgggactgagacacggcccagactcctacgggaggcagcagtggggaatattggacaatgggcgcaagcctgatccagcaatgccgcgtgggtgaagaaggtcttcggattgtaaagccctttcggcggggacgatgatgacggtacccgcagaagaagccccggctaacttcgtgccagcagccgcggtaat

SEQ ID NO: 8912 - DNA, 490 bp, unidentified
  misc_feature 1..490: note = Ascusbbf_1554007, encodes 16S rRNA
  source 1..490: mol_type = genomic DNA
agagtttgatcatggctcaggacgaacgctggcggcgtgcttaacacatgcaagtcgaacggagttaaggagcttgcttcttaacttagtggcgaacgggtgagtaacgcgtgaggaacctgcctctcagtgggggacaacagttggaaacgactgctaataccgcatgacactatagtaccgcatggtacattagtcaaagatttattgctgagagatggcctcgcgtctgattagctagttggtggggtaacggcccaccaaggcgacgatcagtagccggactgagaggttgaccggccacattgggactgagatacggcccagactcctacgggaggcagcagtggggaatattgggcaatgggcgaaagcctgacccagcaacgccgcgtgaaggaagaaggccttcgggttgtaaacttcttttaccagggacgaacacaatgacggtacctggagaaaaagcaacggctaactacgtgccagc

SEQ ID NO: 8913 - DNA, 490 bp, unidentified
  misc_feature 1..490: note = Ascusbbf_959660, encodes 16S rRNA
  source 1..490: mol_type = genomic DNA
agagtttgatcctggctcaggacgaacgctggcggcacgcctaatgcatgcaagtcgaacgacgcaccctggaggagtaatcccccggggtgacggagtggcgaacgggtgcgtaacacgtgagcaacctgccccgaagatcggaatagcccaaggaaacttggattaataccgaataccctcatccttccgcatggtcggatgaggaaaggcctttgcgcttcgggatgggctcgcggcctatcagcttgttggtgaggtaacggctcaccaaggcaacgacgggtagctggtctgagaggacgatcagccacactgggactgagacacggcccagactcctacgggaggcagcagcagggaatcttgcgcaatggacgaaagtctgacgcagcgatgccgcgtggaggatgacggccctcgggttgtaaactcctttcaggagggacgaaattgacggtacctccagaagaagccccggctaactacg

SEQ ID NO: 8914 - DNA, 490 bp, unidentified
  misc_feature 1..490: note = Ascusbbf_656800, encodes 16S rRNA
  source 1..490: mol_type = genomic DNA
agagtttgatcctggctcagattgaacgctggcggcaggcctaatacatgcaagtcgaacggtaacatggaagtagcaatacttttgatgacgagtggcggacgggtgagtaaaatttgggaatctacctatcagagggggatagcaactggaaacggttgataagaccgcgtacgctctgaggaggaaagtaatgggatcgaaagaccattagctgatagatgagcccaaacgggattagctagtaggcggggtaatagcccacctaggcgacgatctctagctggttttagcggatgatcagccacattggaactgagacacggtccaaactcctacgggaggcagcagtagggaatattgcacaatggagggaactctgatgcagccatgccgcgtgtgtgaagaaggccttcgggttgtaaagctctgttgttgaagaagaacgtgcgtgagagtaactgttcacgcagtgacggtattcaaccag

SEQ ID NO: 8915 - DNA, 490 bp, unidentified
  misc_feature 1..490: note = Ascusbbf_829426, encodes 16S rRNA
  source 1..490: mol_type = genomic DNA
agagtttgatcatggctcaggacgaacgctggcggcatgcctaatacatgcaagtcgagcgaacatactttggagcttgctccaaagtattgttagcggcggatgggtgagtaacacgtgggcaacctgccctgtagatggggataactccgggaaaccggggctaataccgaataattagtttgtccgcatggacgaactctaaaagacggctcacgctgtcactgcaggatgggcccgcggcgcattagctagttggtggggtaatggcctaccaaggcgacgatgcgtagccgacctgagagggtgatcggccacactgggactgagacacggcccagactcctacgggaggcagcagtagggaatcttccacaatggacggaagtctgatggagcaatgccgcgtgaacgaagaaggttttcggatcgtaaagttctgttgtgagggaagaacaagtacgagagtaactgctcgtaccttgacggt

SEQ ID NO: 8916 - DNA, 470 bp, unidentified
  misc_feature 1..470: note = Ascusbbf_1063212, encodes 16S rRNA
  source 1..470: mol_type = genomic DNA
agagtttgatcatggctcagagtgaacgctggcggcatgcttaacacatgcaagtcgcacggatgcttcggcattagtggcggacgggtgagtaacgcgtaggaacgtatccacgggtgggggataacgctgggaaactggcgctaataccgcatgatgcctgagggccaaagctttagcgcctgtggagcggcctgcgtacgattagcttgttggtggggtaatggcctaccaaggctacgatcgttagctggtctgagaggacgatcagccacactgggactgagacacggcccagactcctacgggaggcagcagtggggaatattggacaatgggcgcaagcctgatccagcaatgccgcgtgtgtgaagaaggtcttcggattgtaaagcactttcgacagggacgatgatgacggtacctgtagaagaagccccggctaacttcgtaccagcagccgcggtaat

SEQ ID NO: 8917 - DNA, 490 bp, unidentified
  misc_feature 1..490: note = Ascusbbf_1819413, encodes 16S rRNA
  source 1..490: mol_type = genomic DNA
agagtttgatcatggctcaggatgaacgctggcggcgtgcttaacacatgcaggtcgaacgaagctcctgaagctttctttcgggaacgcggaaggatgacttagtggcggacgggtgagtaacgcgtgggtaacctgcccctgggagggggacaacagctggaaacggctgctaataccgcatgatccgggagtgccgcatggctcttccgggaaagcgaaacgcccagggatgggcccgcgtctgattagccggttggcggggtaacggcccaccaaagcgatgatcagtagccggactgagaggttggacggccacattgggactgagacacggcccaaactcctacgggaggcagcagtggggaatattgcacaatggagggaactctgatgcagcgacgccgcgtgagtgaagaagtgtttcggcatgtaaagctctatcagcagggaagaagatgacggtacctgactaagaagccccggctaa

SEQ ID NO: 8918 - DNA, 490 bp, unidentified
  misc_feature 1..490: note = Ascusbbf_1625810, encodes 16S rRNA
  source 1..490: mol_type = genomic DNA
agagtttgatcctggctcaggatgaacgctagcggcaggcctaacacatgcaagtcgaggggcagcggggacttcggtccgccggcgaccggcgcacgggtgagcaacgcgtatagaacctaccctgtacagggggatagcccagagaaatttggatcaataccccgtggtacgtgggcccggcatcgggcccccgttaaaggactccggtacaggatggctatgcgtcccattagttagttggcagggtaacggcctaccaagacgtcgatgggtaggggccctgagagggggatcccccacactggtactgagacacggaccagactcctacgggaggcagcagtgaggaatattggacaatgggcgatggcctgatccagccatgccgcgtgcaggaagaatgtcctatggactgtaaactgcttttgtacgggaagaaccgggggcacgcgtgcccccctgacggtaccgtaagaataaggatcgg

SEQ ID NO: 8919 - DNA, 490 bp, unidentified
  misc_feature 1..490: note = Ascusbbf_1456386, encodes 16S rRNA
  source 1..490: mol_type = genomic DNA
agagtttgatcatggtcaggacgaacgctggcggcgtgcctaacacatgcaagtcgagcggagtaaaaggaaagcttgcttttcttttgcttagcggcggacgggtgagtaacgcgtgggcaatctacctttcacagggggataacacagggaaacttgtgctaataccgcataacaccttatcatggcatcatgagaaggtcaaaggagaaatccggtgaatgatgagcccgcgtccgattagctagttggtgaggtaatggctcaccaaggcaacgatcggtagccgaactgagaggttgatcggccacattgggactgagacacggcccagactcctacgggaggcagcagtggggaatattgcgcaatgggggaaaccctgacgcagcaacgccgcgtgaaggaagaaggccttcgggttgtaaacttctttgatcagggaagaataaatgacggtacctgaagaacaagccacggctaactacgt

SEQ ID NO: 8920 - DNA, 490 bp, unidentified
  misc_feature 1..490: note = Ascusbbf_1881803, encodes 16S rRNA
  source 1..490: mol_type = genomic DNA
agagtttgatcatggctcaggataaacgctggcggcgcacataagacatgcaagtcgaacggaagtcgtcagagaacagattgaagatttatctgattgaagttctttgacaatggctttagtggcggactggtgagtaacgcgtgagcaacctgcctaacagaggggaataacagtgagaaatcattgctaataccgcatatgctcacagtagcacatgctacagtgaggaaaggagaaatccgctgatagatgggctcacgtctgattagctagttggtggggtaaaagcctaccaaggcgacgatcagtagccggactgagaggttggacagccacattgggactgagatacggcccagactcctacgggaggcagcagtcgggaatattgcgcaatggaggaaactctgacgcagtgacgccgcgtataggaagaaggttttcggattgtaaactattgtcattagggaagataaaagactgtacc

SEQ ID NO: 8921 - DNA, 489 bp, unidentified
  misc_feature 1..489: note = Ascusbbf_771699, encodes 16S rRNA
  source 1..489: mol_type = genomic DNA
agagtttgatcctggctcagaatgaacgctggcggcatggattaggcatgcaagtcgaacggggcccttcggggcccagtggcgaaagggtgagtaacacgtgaggaacctgcccggaaggccggaataagcgctggaaacggcgtgtaatgccggatgaggcggcgccggggcatcccggctccgcgaaagattcatcccttccggatggcctcgcggcccattagcttgttggcggggtgaaggcccaccaaggctttgacgggtaggtggtctgagaggatggtcacccacactgggactgagacactgcccagactccttcgggaggctgcagtcgagaatcttccgcaatgggcgcaagcctgacggagcgatgccgcgtgagggacgaaggccttcgggttgtaaacctctgtcacccgggacgagacagacggtaccgggagaggaagccacggctaactacgtgccagcagccgcggtaat

SEQ ID NO: 8922 - DNA, 490 bp, unidentified
  misc_feature 1..490: note = Ascusbbf_1258852, encodes 16S rRNA
  source 1..490: mol_type = genomic DNA
agagtttgatcatggctcaggatgaacgctagcgataggcttaacacatgcaagtcgaggggcagcagggctttcgggccgctggcgaccggcgcacgggtgcgtaacgcgtatgcaacttgccctgtaatggaggataacccgctgaaaggcggactaatactgcgtatgctcacagagaggcatctctcggtgaggaaagaaattcgatacaggataggcatgcgtcccattagctagttggtgaggtaacggctcaccaaggcgacgatgggtaggggaactgagaggtttatcccccacactggtactgagacacggaccagactcctacgggaggcagcagtgaggaatattggtcaatgggcgagagcctgaaccagccaagtcgcgtgaaggatgactgtcttatggattgtaaacttcttttgtatgggaataacatcacccacgtgtgggtgtctgcatgtaccatacgaataagcatcgg

SEQ ID NO: 8923 - DNA, 490 bp, unidentified
  misc_feature 1..490: note = Ascusbbf_1743036, encodes 16S rRNA
  source 1..490: mol_type = genomic DNA
agagtttgatcctggctcaggacgaacgctggcggcgtgcctaacacatgcaagtcgaacggattttaaaagagcttgctcttttaaaattagtggcggacgggtgagtaacgcgtgagtaacctgccttgaagagggggataacaccaagaaattggtgctaataccgcataaaatacataattcgcatgaaagatgtatcaaaggagcaatccgctttgagatggactcgcgtccgattagctagttggtgaggtaaaagcccaccaaggcaacgatcggtagccgggttgagagactgaacggccacattgggactgagacacggcccagactcctacgggaggcagcagtgggggatattgcacaatgggcgaaagcctgatgcagcaacgccgcgtgagggaagaaggtcttcggattgtaaacctctgtccaaagggaagaaaaaatgacggtacctttggaggaagctccggctaactacgtg

SEQ ID NO: 8924 - DNA, 490 bp, unidentified
  misc_feature 1..490: note = Ascusbbf_1054388, encodes 16S rRNA
  source 1..490: mol_type = genomic DNA
agagtttgatcatggctcaggatgaacgctggcggcatgcctaagacatgcaagtcgtacgaggtggccctttgaactctgtacttgtatagagcgatttggatttccacctagtggcgaaagggtgagtaacacgtgagtaatctacctcagagactggaataactattggaaacgatagctaatgccggatgatatgtacaatgatacgttgttgtatagtaaaaggagcctttaaagcttcactttgagatgagcttgcgacgtattagctagttggtgaggtaatggcttaccaaggcgacgatgcgtagccgacctgagagggtgatcggccacactgggactgagacacggcccagactcctacgggagacagcagttagggatattcgtcaatggaggaaactctgaacgagcaatgccgcgtgagtgatgacagttctatggattgtaaaactctgttgttagggacgaacgacctgtatag

SEQ ID NO: 8925 - DNA, 490 bp, unidentified
  misc_feature 1..490: note = Ascusbbf_1701811, encodes 16S rRNA
  source 1..490: mol_type = genomic DNA
agagtttgatcatggctcaggatgaacgctggcggcgtgcctaacacatgcaagtcgagcggtatatagtggaatgaaacttcggtcgagtgaagctatagagagcggcggacgggtgagtaacgcgtaggcaacctgccccatacagagggatagcctcgggaaaccgggattaaaacctcataacgcagagagttcacatggactatctgccaaagattcatcggtatgggatgggcctgcgtctgattagctagttggtgaggtaacggctcaccaaggcgacgatcagtagccgacctgagagggtaatcggccacattggaactgagacacggtccaaactcctacgggaggcagcagtggggaatattgcacaatgggcgaaagcctgatgcagcaacgccgcgtgagcgatgaaggcctttgggtcgtaaagctctgtccttggggaagaaacaaatgacggtacccttggaggaagccccgg

SEQ ID NO: 8926 - DNA, 490 bp, unidentified
  misc_feature 1..490: note = Ascusbbf_489930, encodes 16S rRNA
  source 1..490: mol_type = genomic DNA
agagtttgatcctggctcaggacgaacgctggcggcgtgcctaacacatgcaagtcgaacggagctcagatgcagaactcttcggagggacgcatcgaaagcttagtggcggacgggtgagtaacgcgtgagtaacctgcccttcagagggggacaacagttggaaacgactgctaataccgcatgacgtatgagagagacatctctttcataccaaaggagcaatccgctgaaggatgggctcgcgttggattagatagttggtggggtaacggcctaccaagtctacgatccatagccggactgagaggttgatcggccacattgggactgagacacggcccagactcctacgggaggcagcagtgggggatattgcacaatggaggaaactctgatgcagcaacgccgcgtgagggaagaaggtcttcggattgtaaacctttgtctttggtgacgaaacaaatgacggtagccaaggaggaagctc

SEQ ID NO: 8927 - DNA, 361 bp, unidentified
  misc_feature 1..361: note = Ascusbbf_1486639, encodes 16S rRNA
  source 1..361: mol_type = genomic DNA
agagtttgatcatggctcaggatcaacgctggcggcgtgcctaatgcatgcaagtcgaacggggcttccttcgggaggttcacgtggcggacgggtgaggaacacgtgggcgacctaccctggggcgggggatacccgcgagaaatcgtggataattccgcatacgctcgctctgcggttggcagggtgaggaaaggtgcatttcggtgcgccacccttggcggggcctgcggccgattagctagttgggggggtaacggcctcccaaggcgatgatcggtagctggtctgagaggacggccagccacacggggactgagacacggccccgactcctacgggagccagcagccgcggtaat

SEQ ID NO: 8928 - DNA, 490 bp, unidentified
  misc_feature 1..490: note = Ascusbbf_1084311, encodes 16S rRNA
  source 1..490: mol_type = genomic DNA
agagtttgatcatggctcaggacgaacgctggcggcgtgcttaacacatgcaagtcgaacgaggacattccgggagcttgctccaggggtgttcgagtggcggacgggtgagtaacgcgtgaggaacctgtcttacacagggggataacgcaccgaaaggtgtgctaatagcgcataagaccacactttcgcatgggagaggggtcaaaggagcgatccggtgtaaggtggactcgcgtcccgttaggcagttggcggggtaacggcccaccaaaccgacgatgggtagccgacctgagagggtgatcggccacattggaactgagacacggtccaaactcctacgggaggcagcagtggggaatattgggcaatgggcgcaagcctgacccagcaacgccgcgtgagggaagaaggttttcggattgtaaacctctgtcctcgatgaaaagttgaagatggtaattgaggaggaagccccggctaacta

SEQ ID NO: 8929 - DNA, 490 bp, unidentified
  misc_feature 1..490: note = Ascusbbf_1115289, encodes 16S rRNA
  source 1..490: mol_type = genomic DNA
agagtttgatcctggctcaggatgaacgctggcggcgtgcctaacacatgcaagtcgagcggagatgtcacaccggatgaagattcgtcggaatccaccgtgacattcttagcggcggatgggtgagtaacacgtggacaacctgcccttgactgggggatagcagctggaaacggctgataataccgcatagatcatcggatcgcatgaactgatgaggaaagatttatcggtcagggatgggtccgcgtcggattaactagttggtgaggtaacggcccaccaaggtgatgatccgtagccggcctgagagggcgaccggccacattgggactgagacacggcccagactcctacgggaggcagcagtgggggatattgcacaatgggggaaaccctgatgcagcgacgccgcgtgaaggaagaagtactccggtatgtaaacttctatcagcagggaagaagatgacggtacctgactaagaagccc

SEQ ID NO: 8930 - DNA, 490 bp, unidentified
  misc_feature 1..490: note = Ascusbbf_1675614, encodes 16S rRNA
  source 1..490: mol_type = genomic DNA
agagtttgatcatggctcaggatgaacgctagcggcaggcctaacacatgcaagtcgggcggtaacaggagcagcaatgcttgctgacgagcggcagacgggtgagtaacgcgtatgcaaccttcccttcgcacggggacagccttccgaaaggaggattgatacccgatagtccggacgagaggcatctcttgtccgttaaagattcatcggcggaggatgggcatgcgtggcattagctagacggcggggcgacggcccaccgtggcgatgatgcctaggggttctaaaaggaaggtcccccacatcggtactgagacacggaccgaactcctacgggaggcagcagtgaggaatattggacaatgggggcaaccctgatccagccaaaccgcgtgaaggacgaaggccctagtggtcgtaaacttcttttgctctgggataacgagcggcacgcgtgccgccttgaaggtacagagcgaataagcac

SEQ ID NO: 8931 - DNA, 490 bp, unidentified
  misc_feature 1..490: note = Ascusbbf_1811917, encodes 16S rRNA
  source 1..490: mol_type = genomic DNA
agagtttgatcatggctcaggatgaacgctagcgacaggcctaacacatgcaagtcgaggggcagcattgaggtagcttgctacttcagatggcgaccggcgcacgggtgagtaacgcatatgcaacctggcttcggctacgggatagccttgcgaaagtaagattaataccgtatgcgatatgagatgacatcgtcttatattgaaagatttatcggcagaagatgggcatgcgtctgattagttagttggcggggtaacggcccaccaagacatcgatcagtaggggttctgagaggaaggtcccccacattggaactgagacacggtccaaactcctacgggaggcagcagtgaggaatattggtcaatggacggaagtctgaaccagccaagtcgcgtgaaggaagacggttctatggattgtaaacttcttttgcccgagggtaaagtgagctacgtgtagcttattgcaagtatcgggtgaata

SEQ ID NO: 8932 - DNA, 490 bp, unidentified
  misc_feature 1..490: note = Ascusbbf_1372968, encodes 16S rRNA
  source 1..490: mol_type = genomic DNA
agagtttgatcctggctcaggatgaacgctagctacaggcttaacacatgcaagtcgagcggaacaccttcgggtgtttagcggctgacgggtgagtaacacgtatccaacctttcccttactcgggtatagcctcgggaaactgagagtaatccccgatgtggtgcacggaaagcattttttgcgcacgaaagattcttcggtaaggggtgtggatgcgttccattaggtagtaggcggggtaacgcctcacctagccgatgatggataggggttctgagaggaaggtcccccacattggaaacgagaaacggaccaaactcctacgggaggcagaagtgaggaatattggtcaatgggcgagagcctgaaccagcaaagtagcgtgcaggaggacggccctatggggtgtaaactgcttttgtgcgggaataacggtcgccacgtgtggtgatgtgcatgtaccgtacgaataaggatcggctaactc

SEQ ID NO: 8933 - DNA, 490 bp, unidentified
  misc_feature 1..490: note = Ascusbbf_1004598, encodes 16S rRNA
  source 1..490: mol_type = genomic DNA
agagtttgatcatggctcaggatgaacgctggcggcgtgcttaacacatgcaagtcgaacggagttgttttacggaagtcttcggatggaagtaaaataacttagtggcggacgggtgagtaacgcgtgggtaacctgccttgtacagggggataacaaccggaaacggttgctaataccgcataagcgcacagtgtcgcatgacacggtgtgaaaagatttatcggtacaagatggacccgcgtctgattagctagttggtgaggtaatggctcaccaaggcatcgatcagtagccggcttgagagagtgaacggccacattgggactgagacacggcccaaactcctacgggaggcagcagtggggaatattgcacaatgggggaaaccctgatgcagcgacgccgcgtgagtgaagaagtatttcggtatgtaaagctctatcagcagggacgaataaaatgacggtacctgactaagaagccccgg

SEQ ID NO: 8934 - DNA, 490 bp, unidentified
  misc_feature 1..490: note = Ascusbbf_470789, encodes 16S rRNA
  source 1..490: mol_type = genomic DNA
agagtttgatcatggctcaggatgaacgctggcggcgtgcttcatacatgcaagtcgaacgagaagagatagcttgctatcttggaaagtggcggacgggtgagtaatacatagggaatctgcccttagccgggggacaacagttggaaacgactgctaataccgcatatgagtatagttgaaatattatacttgaaaactccggtggctagggatgagcctgtgcctgattagttagttggcggggtaaaggcccaccaaggcgacgatcagtagctggtttgagaggatgatcagccacaatgggactgagacacggcccatactcctacgggaggcagcagtagggaattttgcgcaatgggcgaaagcctgacgcagcaacgccgcgtgtgcgatgaagcccttaggggtgtaaagcactgtcagtagggacgaaagatgacggtacctacagaggaagcaccggctaactccgtgccagcagccg

SEQ ID NO: 8935 - DNA, 490 bp, unidentified
  misc_feature 1..490: note = Ascusbbf_1082181, encodes 16S rRNA
  source 1..490: mol_type = genomic DNA
agagtttgatcctggctcaggacaaacgctggcggcgtgcctaacacatgcaagtcgaacgaagcactggcgaaagagacttcggtcaattgaacctttgacttagtggcggacgggtgagtaatgcatgagcaatctgccctggagtgggggacaacagttggaaacgactgctaataccgcatgatgtcatcggagggcatcctctgatgaccaaagatttatcgctctgggatgagctcatgtctgattagttcgttggcggggtaacggcccaccaagactacgatcagtagccggactgagaggttgaacggccacattgggactgagatacggcccagactcctacgggaggcagcagtggggaatattgggcaatgggcgcaagcctgacccagcaacgccgcgtgaaggaagaaggctttcgggttgtaaacttcttttaccagggacgaagaaagtgacggtacctggagaataagccacg

SEQ ID NO: 8936 - DNA, 490 bp, unidentified
  misc_feature 1..490: note = Ascusbbf_710066, encodes 16S rRNA
  source 1..490: mol_type = genomic DNA
agagtttgatcctggctcaggatgaacgctggcggcgtgcctaatacatgcaagtcgaacgctaattttcggattagagtggcgaacgggtgagtaacacgtaggtaacctgcccataagacaaggataactactggaaacggtagctaatactggatagtatatagaatcgcatgattttatatttaaaggtgctgcaaggcactacttatggatggacctgcggcgcattagctagttggtgaggtaacggcccaccaaggcgacgatgcgtagccggactgagaggttgaacggccacattgggactgagacacggcccagactcctacgggaggcagcagtagggaatattgcacaatgggggaaaccctgatgcagcgacgccgcgtgaaggaagaggtatctcggtatgtaaacttctatcagcagggaagaaaatgacggtacctgactaagaagccccggctaactacgtgccagcagccgc

SEQ ID NO: 8937 - DNA, 488 bp, unidentified
  misc_feature 1..488: note = Ascusbbf_1044227, encodes 16S rRNA
  source 1..488: mol_type = genomic DNA
agagtttgatcatggctcagaacgaacgctggcggcaggcttaacacatgcaagtcgagcgccccgcaaggggagcggcagacgggtgagtaacacgtgggaatctacccatccctgcggaacaactccgggaaactggagctaataccgcatacgccctacgggggaaagatttatcggggatggatgagcccgcgttggattagctagttggtggggtaaaggcctaccaaggcgacgatccatagctggtctgagaggatgatcagccacattgggactgagacacggcccaaactcctacgggaggcagcagtggggaatattggacaatgggcgcaagcctgatccagccatgccgcgtgcgggaagacggccctatgggttgtaaaccgcttttgttggggagcaataaggtccacgagtggatcgatgagagtacccagcgaataagcatcggctaactccatgccagcagccgcggtaat

SEQ ID NO: 8938 - DNA, 490 bp, unidentified
  misc_feature 1..490: note = Ascusbbf_1122634, encodes 16S rRNA
  source 1..490: mol_type = genomic DNA
agagtttgatcatggctcaggatgaacgctggcggcgtgcctaacacatgcaagtcgaacggtgaaggcgccttcgggcgcgaatgaagtggcgaacgggtgagtaacacgtgaccaacctgccccgcgcaccgggacagccccccgaaagggggattaataccggatgcgccgcggcccccgcatgggggccgcgggaaagcccaggcggcgcgggatggggtcgcggcccatcaggtagtaggtcgggtagcggccgacctagccgacgacgggtagccgggttgagagaccgaccggccacattgggactgagatacggcccagactcctacgggaggcagcagtggggaatattgcgcaatgggggcaaccctgacgcagcaacgccgcgtgcgggacgaaggcactcgtgtcgtaaaccgctttcagcagggaagacatcgacggtacctgcagaagaagccccggctaactacgtgccagcagc

SEQ ID NO: 8939 - DNA, 466 bp, unidentified
  misc_feature 1..466: note = Ascusbbf_1791731, encodes 16S rRNA
  source 1..466: mol_type = genomic DNA
agagtttgatcctggctcaggatgaacgctggcggcgtgcttaacacatgcaagtcgaacggttaaaccggcttcggccggacatagagtggcgaacgggtgagtaacacgtgaccaacctgccccgcgcaccgggacagcctcgcgaaagcgggattaataccggatactccggcggcgcgggatggggtcgcggcccatcaggtagtaggtcgggcaatggccgacctagccgacgacgggtagccgggttgagagaccgaccggccacattgggactgagatacggcccagactcctacgggaggcagcagtggggaatattgcgcaatgggggcaaccctgacgcagcaacgccgcgtgcgggatgaaggccttcgggttgtaaaccgctttcagcagggaggatagtgacagtacctgcacaagaagccccggctaactacgtgccagcagccgcggtaat

SEQ ID NO: 8940 - DNA, 482 bp, unidentified
  misc_feature 1..482: note = Ascusbbf_751658, encodes 16S rRNA
  source 1..482: mol_type = genomic DNA
agagtttgatcctggctcagaacgaacgctggcggcgtgcctaacacatgcaagtcgaacgagggctcccttcggggatgtccctagtggcgcacgggtgagtaacgcgtgggaatctgtccaagtgtggggaacaactactggaaactgtagctaataccgcatacgccctacgggggaaaggcttcggccgcacatggatgagcccgcgtcagattagcttgttggtggggtaacggcctaccaaggctacgatctgtaactggtctgagaggacgatcagtcacactggaactgagacacggtccagactcctacgggaggcagcagtggggaattttgcacaatgggggaaaccctgatgcagcgacgccgcgtgggtgatgaaggccttagggttgtaaagccctttcagcagggaagatgatgacggtacctgcagaagaagccccggctaactccgtgccagcagccgcggtaat

SEQ ID NO: 8941 - DNA, 395 bp, unidentified
  misc_feature 1..395: note = Ascusbbf_1818871, encodes 16S rRNA
  source 1..395: mol_type = genomic DNA
agagtttgatcatggctcaggatgaacgctagcgacaggcctaacacatgcaagtcgaggggcagcgcgggagaagcttgcttttcctggcggcgaccggcgcacgggtgcgtaacaggtgtgcaatctgtccatagtcgggggatagcccagcgaaagctgaattaacactccatgtgaatcgaagccgcatgactttgatttgaaacgcaaggactatgggtgaggaatattggtcaatgggcgagagcctgaaccagccaagtcgcgtgaaggatgaaggttctatggattgtaaacttcttttgtccgagggtaaaaaaggccacgtgtgacttcttgcaagtatcggacgaataagcatcggctaactccgtgccagcagccgcggtaat

SEQ ID NO: 8942 - DNA, 490 bp, unidentified
  misc_feature 1..490: note = Ascusbbf_775479, encodes 16S rRNA
  source 1..490: mol_type = genomic DNA
agatttgatcctggctcaggatgagcgctggcggcgtgcataacacattcaagtcgaacggacgacagggggcttgctccctgaagtcagtggcggacgggtgagtaacgcgtgagcaacctgccttggtctgcgggataacattgggaaaccggtgctaataccgcataacgcatcgagatcacatggtcatgatgccaaagaagcgattcggaacaagatgggctcgcgtctgattagcttgttggtgaggtaacggcccaccaaggcgacgatcagtagccggactgagaggttgaacggccacattggaactgagatacggtccagactcctacgggaggcagcagtggggaatattgggcaacgggcgaaagcctgacccagcgacgccgcgtggaggaagaaggtcttcggattgtaaactcctgtcagcagggaagaagaaagtgacggtacctgcagaggaagccacggctaactacgtgcc

SEQ ID NO: 8943 - DNA, 177 bp, unidentified
  misc_feature 1..177: note = Ascusbbf_1033194, encodes 16S rRNA
  source 1..177: mol_type = genomic DNA
agagtttgatcatggctcagagtttgatcaggctcagagtttgatcaggctcagagtttgatcaggctcagagtttgatcatggctcagagtttgatcatggctcagagtttgatcatggctcagagtttgatcaggctcagagtttgatcatggctcagccagcagccgcggtaat

SEQ ID NO: 8944 - DNA, 490 bp, unidentified
  misc_feature 1..490: note = Ascusbbf_1077909, encodes 16S rRNA
  source 1..490: mol_type = genomic DNA
agagtttgatcatggctcaggacgaacgctggcggcgtgcttaacacatgcaagtcgaacgaggcaattcccttcgggggattaccgagtggcggacgggtgagtaacgcgtgagcaatctgtcccagacagggggataacaactggaaacagttgctaataccgcataagaccacgaagtcgcatggctttgaggtaaaaggagcgatccggtctggggtgagttcgcgtctgattagatagttggcgaggtaacggctcaccaagtcgacgatcagtagccgacctgagagggtgaccggccacattgggactgagacacggcccagactcctacgggaggcagcagtggggaatattgggcaatgggggaaaccctgacccagcaacgccgcgtgagggaagaaggttttcggattgtaaacctctgtccttggggacgaaataaatgacggtacccgaggaggaagccccggctaactacgtgcca

SEQ ID NO: 8945 - DNA, 490 bp, unidentified
  misc_feature 1..490: note = Ascusbbf_1742846, encodes 16S rRNA
  source 1..490: mol_type = genomic DNA
agagtttgatcctggctcaggacaaacgctggcggcgcacataagacatgcaagtcgaggggcatcatggagtttgcttgcaaactccgatggtgaccggcgcacgggtgagtaacgcgtatccaaccttccccttagtagggcatagcccggcgaaagtcggattaataccctatgttgtcgtttgaagacatctgaagacgattaaagattgatcgctaagggatggggatgcgtctgattaggttgttggcggggtaacggcccaccaagccatctatcagtaggggttttgagaggaaggtcccccacattggtactgagacacggaccaaactcctacgggaggcagcagtgaggaatattggtcaatgggcgagagcctgaaccagccgagtagcgtgcaggatgactgccctatgggttgtaaactgcttttatcaggggataaagtgacgtacgtgtacgtttttgtaggtacctgatgaat

SEQ ID NO: 8946 - DNA, 340 bp, unidentified
  misc_feature 1..340: note = Ascusbbf_1891001, encodes 16S rRNA
  source 1..340: mol_type = genomic DNA
agagtttgatcctggctcaggacgaacgctggcggcgtgcctaatacatgcaagtcgagcgaacagataaggagcttgctcctttgacgttagcggcgacctgagagggtgatcggccacactgggactgagacacggcccagactcctacgggaggcagcagtagggaatcttccacaatgggcgaaagcctgatggagcaacgccgcgtgagtgaagaaggttttcggatcgtaaaactctgttgtaagggaagaacaagtacagtagtaactggctgtaccttgacggtaccttattagaaagccacggctaactacgtgccagcagccgcggtaat

SEQ ID NO: 8947 - DNA, 490 bp, unidentified
  misc_feature 1..490: note = Ascusbbf_1869633, encodes 16S rRNA
  source 1..490: mol_type = genomic DNA
agagtttgatcctggctcaggatgaacgctggcggcgtgcataacacattcaagtcgaacgaagcactggcgaggaagtcttcggatggaattgcttttgacttagtggcggacgggtgagtaacgcgtgagcaaccttcctggcagtgagggataacacagggaaacttgtgctaataccgcatgacgcacgattgtcgcatggcagacgtgccaaagattaattgctgccagatgggctcgcgcctgattagatagttggcagggtaacggcctaccaagtcgacgatcagtagccggactgagaggttgaacggccacattggaactgagagacggtccaaactcctacaggaggcagcagtggggaatattgcacaatgggggaaaccctgatgcagcgacgccgcgtgagtgaagaagtatttcggtatgtaaagctctatcagcagggaagaagatgacggtacctgcacaagaagccccggct

SEQ ID NO: 8948 - DNA, 490 bp, unidentified
  misc_feature 1..490: note = Ascusbbf_1820853, encodes 16S rRNA
  source 1..490: mol_type = genomic DNA
agagtttgatcctggctcagaacgaacgctggcggcaggcttaacacatgcaagttgaacgggaatgttctggtagcttgctactgggacatgagagtagcgcactggtgagtaacacgtgggaacataccttttggtgggggatagcaattggaaacgattgataataccgcataagccctaagggggaaagattaattgccgaaagattggcccgcggaagattagattgttggtggggtaacggcctaccaagtcgacgatcagtagccggactgagaggttgaacggccacattgggactgagatacggcccagactcctacgggaggcagcagtcgggaatattgcgcaatggaggaaactctgacgcagtgacgccgcgtgcaggaagaaggttttcggattgtaaactgctttagacagggaagaactaagacagtacctgtagaataagctccggctaactacgtgccagcagccgcggtaa

SEQ ID NO: 8949 - DNA, 490 bp, unidentified
  misc_feature 1..490: note = Ascusbbf_776010, encodes 16S rRNA
  source 1..490: mol_type = genomic DNA
agagtttgatcctggctcaggatgaacgctagctacaggcttaacacatgcaagtcgcggggcatcatgaagggagcttgctctctttgatggcgaccggcgcacgggtgagtaacgcgtatccaacctgccccctagtagggaacagcccgtagaaatgcggattaatgccctatgttctccgaagacggcatcagattcggagcaaaggcctttggttgctaggggatggggatgcgtctgattaggcagcaggcggggtaacggcccacctggccgtcgatcagtaggggttctgagaggaaggtcccccacactggtactgagacacggaccagactcctacgggaggcagcagtgaggaatattggtcaatggccgagaggctgaaccagccaagtagcgtgcaggatgacggccctacgggttgtaaactgcttttatcagggaataaagtgagggacgtgtccctttttgtatgtacctgatg

SEQ ID NO: 8950 - DNA, 172 bp, unidentified
  misc_feature 1..172: note = Ascusbbf_1804525, encodes 16S rRNA
  source 1..172: mol_type = genomic DNA
agagtttgatcctggctcaggacgaacgctggcggcgtgcctaatacatgcaagtcgagcgagcggaaccaacagatttacttcggtaatgacgttgggaaagctcaaggaagataatgacggtacttgaggaggaagccccggctaactacgtgccagcagccgcggtaat

SEQ ID NO: 8951 - DNA, 490 bp, unidentified
  misc_feature 1..490: note = Ascusbbf_1836553, encodes 16S rRNA
  source 1..490: mol_type = genomic DNA
agagtttgatcatggctcaggacgaacgctggcggcgtgcttaacacatgcaagtcgaacgaagcgtagaaatacgcttagtggcggacgggtgagtaacgcgtgagcaacctgcccttgtcaggggaataacacagagaaatttgtgctaataccgcataacgtacttaagcggcatcgcataggtatcaaagctgaggcggacaaggatgggctcgcgtcccattaggtagttggtgaggtaacggcccaccaagccgacgatgggtagccgacctgagagggtgatcggccacattggaactgagaacggtccagactcctacgggaggcagcagtggggaatattgggcaatggagggaactctgacccagcaacgccgcgtgaatgaagaaggtcttcggattgtaaagttctgtgatgggggacgaagaaagtgacggtaccccaatagcaagctacggctaactacgtgccagcagccgcggt

SEQ ID NO: 8952 - DNA, 490 bp, unidentified
  misc_feature 1..490: note = Ascusbbf_1469390, encodes 16S rRNA
  source 1..490: mol_type = genomic DNA
agagtttgatcatggctcaggatgaacgctggcggcgtgcttaacacatgcaagtcgaacggagtgctcatgaaggagttttcggacaacagattgagttacttagtggcggacgggtgagtaacgcgtgaggaacctgccttggagtggggaataacagatagaaatatctgctaataccgcatgatgcagttgggtcgcatggctctgactgccaaagatttatcgctctgagatggcctcgcgtctgattagatagttggcggggtaacggcccaccaagtcgacgatcagtagccggactgagaggttggccggcaacattgggactgagacacggcccagactcctacgggaggcagcagtggggaatattgggcaatgggcgcaagcctgacccagcaacgccgcgtgaaggaagaaggccctcgggttgtaaacttcttttatccaggacgaaggaagtgacggtactggatgaataagccac

SEQ ID NO: 8953 - DNA, 490 bp, unidentified
  misc_feature 1..490: note = Ascusbbf_371478, encodes 16S rRNA
  source 1..490: mol_type = genomic DNA
agagtttgatcctggctcaggacgaacgctggcggcgcgcttaacacatgcaagtcgaacggggcaccttcgggtgtctagtggcgaacgggtgcgtaacacgtgagcaacctgcctggagttgggggataacctcgggaaaccggggctaataccgcatgagctcctggtctcggatgggatcaggaggaaagcagctttcgggctgtgacttcagaggggctcgcggcgtatcagctagttggtgaggtgaaggctcaccaaggcgacgacgcgtagggggtctgagaggatggccccccacattgggactgagatacggcccagactcctacgggaggcagcagtggggaatcttgcgcaatggccgaaaggctgacgcagcgacgccgcgtgcgggaggaagcccttcggggtgtaaaccgctgtcagaggggacgaaagccagagggaggcaatgccctttggaaggacggtaccctcagaggaa

SEQ ID NO: 8954 - DNA, 490 bp, unidentified
  misc_feature 1..490: note = Ascusbbf_361803, encodes 16S rRNA
  source 1..490: mol_type = genomic DNA
agagtttgatcctggctcagattgaacgctggcggcatgctttacacatgcaagtcgaacggcagcacgggtgcttgcacctggtggcgagtggcgaacgggtgagtaatacatcggaacgtgtcccgtagagggggatagctcggcgaaagccggattaataccgcatgagatctacggatgaaagctggggaccttcgggcctagcgctatgggggcggccgatgtcagattaggtagttggtggggtaaaggcctaccaagccgacgatctgtagctggtctgagaggatgatcagccacactggaactgagacacggtccagactcctacgggaggcagcagtggggaattttggacaatgggcgcaagcctgatccagccatgccgcgtgcaggaagaaggccttcgggttgtaaactgcttttgtcaggaacgaaaagccctgtgtgaataatgcggggtgctgacggtacctgaagaataagc

SEQ ID NO: 8955 - DNA, 490 bp, unidentified
  misc_feature 1..490: note = Ascusbbf_246516, encodes 16S rRNA
  source 1..490: mol_type = genomic DNA
agagtttgatcatggctcagattgaacgctggcggcgtgcttaacacatgcaagtcgtacgtgaaagcgccttcgggcgcgagtaaagtggcgcacgggtgagtaacgcgtggatgatctgcctggtagtggggaataacggctggaaacggccgctaataccgcatgagcttcatatttggctttatgaaggaaagagggcctctgcatatgctcttgctaccggatgagtccgcgtcccattagctagttggcggggtaatggcccaccaaggcgacgatgggtagctgttctgagaggatgatcagccacattggaactggaacacggtccaaactcctacgggaggcagcagtggggaatattgcgcaatgggcgaaagcctgacgcagcgacgccgcgtgagggatgaaggtcttcggatcgtaaacctctgtcagaagggaagaagttatgacgtgctaatcaacgtcatattgacggtacctt

SEQ ID NO: 8956 - DNA, 490 bp, unidentified
  misc_feature 1..490: note = Ascusbbf_386128, encodes 16S rRNA
  source 1..490: mol_type = genomic DNA
agagtttgatcctggctcagaatcaacgctggcggcgtgcctcagacatgcaagtcgaacgattaaagctctcttcggagagtgcataaagtggcgcacgggtgagtaacacgtaagtaatctaccttcgagtggggaataacatcgggaaatcggtgctaataccgcataatgcagcggcatcgtaagatgacagttgttaaaggagcaattcgcttgaagaggagcttgcggcagattagctagttggtaaggtaatggcttaccaaggctacgatctgtatccggtcttagaggacggtcggacacactgacactgaataacgggtcagactcctacgggaggcagcagtcgggaattttgggcaatgggcgaaagcctgacccagcaacgccgcgtgaaggatgaagtatttcggtatgtaaacttcgaaagaataggaagaataaatgacggtactatttataaggtccggctaactacgtgcca

SEQ ID NO: 8957 - DNA, 490 bp, unidentified
  misc_feature 1..490: note = Ascusbbf_120245, encodes 16S rRNA
  source 1..490: mol_type = genomic DNA
agagtttgatcatggctcaggacgaacgctggcggcgtgcctaatacatgcaagtagaacgctgaagagaggagcttgctcttcttggatgagttgcgaacgggtgagtaacgcgtaggtaacctgccttgtagcgggggataactattggaaacgatagctaataccgcataacaatgaatgactcatgtcatttatttgaaaggggcaattgctccactacaagatggacctgcgttgtattagctagtaggtgaggtaacggctcacctaggcgacgatacatagccgacctgagagggtgatcggccacactgggactgagacacggcccagactcctacgggaggcagcagtagggaatcttcggcaatgggggcaaccctgaccgagcaacgccgcgtgagtgaagaaggttttcggatcgtaaagctctgttgtaagtcaagaacgagtgtgagagtggaaaattcacactgtgacggtagct

SEQ ID NO: 8958 - DNA, 490 bp, unidentified
  misc_feature 1..490: note = Ascusbbf_104605, encodes 16S rRNA
  source 1..490: mol_type = genomic DNA
agagtttgatcatggctcaggatgaacgctagcgggaggcctaacacatgcaagccgagcggtagagattcttcggaatcttgagagcggcgcacgggtgcggaacacgtgtgcaacctgcctttatctgggggatagcctttcgaaagggagattaataccccataatataatgagtggcatcacttattattgaaaactccggtggatagagatgggcacgcgcaagattagatagttggtgaggtaacggctcaccaagtcaatgatctttagggggcctgagagggtgatcccccacactggtactgagacacggaccagactcctacgggaggcagcagtgaggaatattggacaatgggtgagagcctgatccagccatcccgcgtgaaggacgacggccctatgggttgtaaacttcttttgtacagggataaacctatttacgtgtaaatagctgaaggtactgtacgaataagcaccggct

SEQ ID NO: 8959 - DNA, 490 bp, unidentified
  misc_feature 1..490: note = Ascusbbf_1740226, encodes 16S rRNA
  source 1..490: mol_type = genomic DNA
agagtttgatcatggctcaggacgaacgctggcggcatgcctaacacatgcaagtcgaacggagatgagaagcttgcttttcatcttagtggcggacgggtgagtaacgcgtgagcaacctgcctctcagtggggaataatgtactgaaaaggacactaataccgcataatgtattgaagccgcatgactttgataccaaagatttattgctgagagatgggctcgcgtccgattagccagttggtggggtaacggcctaccaaagcgacgatcggtagccgaactgagaggttggacggccacattgggactgagacacggcccagactcctacgggaggcagcagtgggggatattgcgcaatgggggaaaccctgacgcagcaatgccgcgtggaggatgaaggtcttcggattggaaactccttttgtcagggacgaaaaatgacggtacctgacgaataagctccggctaactacgtgccagcag

SEQ ID NO: 8960 - DNA, 490 bp, unidentified
  misc_feature 1..490: note = Ascusbbf_159120, encodes 16S rRNA
  source 1..490: mol_type = genomic DNA
agagtttgatcatggctcaggacgaacgctggcggcgtgcctaacacatgcaagtcgaacggacgatacgtcttcggacgtaaagttagtggcggacgggtgagtaacgcgtgagcaacctgcctttaagagggggataacataccgaaaggtatgctaataccgcatagagtatttgggaggcatcttctgaatataaaagatttattgcttaaagatgggctcgcgtctgattagatagttggtgaggtaacggctcaccaagtcaacgatcagtagccggactgagaggtcgaacggccacattggaactgagaaacggtccagactcctacgggaggcagcagtggggaatattgcgcaatggagggaactctgacgcagcaacgccgcgtgaaggaagaaggtcttcggattgtaaacttctttgatgggggacgaaaagaatgacggtaccccaaaaacaagtcacggctaactacgtgccagc

SEQ ID NO: 8961 - DNA, 490 bp, unidentified
  misc_feature 1..490: note = Ascusbbf_201470, encodes 16S rRNA
  source 1..490: mol_type = genomic DNA
agagtttgatcatggctcagattgaacgctggcggcatgctttacacatgcaagtcgaacggcagcacgggagcttgctcctggtggcgagtggcggacgggtgagtaatacatcggaacatgccctgtagtgggggataacttggcgaaagttgagctaataccgcatacgacctgagggtgaaagctggggatcgcaagacctggcgttatgggattggccgatggctaattagctagttggtgaggtaaaggcttaccaaggcgacgattagtagctggtctgagaggatgatcagccacactgggactgagacacggcccagactcctacgggaggcagcagtggggaattttggacaatgggcggaagcctgatccagctatgccgcgtgagtgaagaaggccttcgggttgtaaagctctttcggtcgggaagaagtctgttgggtgaatagcctaacggattgacggtaccgacataagaagc

SEQ ID NO: 8962 - DNA, 480 bp, unidentified
  misc_feature 1..480: note = Ascusbbf_609854, encodes 16S rRNA
  source 1..480: mol_type = genomic DNA
agagtttgatcctggctcagaacgaacgctggcggcatgcctaacacatgcaagtcgaacgatggtttcgtcttcggatggggccatagtggcgcacgggtgggtaacacgtgggaacctgcctttcggttcggaataacgtctggaaacggacgctaacaccggatacgcccttttggggaaagtttacgccgagagaggggcccgcgccggattaggtagttggtggggtaacggcctaccaagccgacgatccgtagctggtctgagaggatgatcagccacactgggactgagacacggcccagactcctacgggaggcagcagtggggaatattggacaatgggcgcaagcctgatccagcaacgccgcgtgagtgatgaaggccttagggttgtaaagctctttcgcacgcgacgatgatgacggtagcgtgagaagaagccccggctaacttcgtgccagcagccgcggtaat

SEQ ID NO: 8963 - DNA, 490 bp, unidentified
  misc_feature 1..490: note = Ascusbbf_337805, encodes 16S rRNA
  source 1..490: mol_type = genomic DNA
agagtttgatcatggctcagattgaacgctggcggcaggcctaacacatgcaagtcgagcggtaacaggggagcttgctcccgctgacgagcggcggacgggtgagtaacgcgtaggaatctacctggtagtgggggatagcccggggaaactcggattaataccgcatacgccttaagggggaaagtgggggaacttcggtcctcacgctatcagaagagcctgcgtaggattagctagttggtagggtaaaggcctaccaaggcgacgatccttaactggtctgagaggatgatcagtcacaccggaactgagacacggtccggactcctacgggaggcagcagtggggaatattggacaatgggggcaaccctgatccagccatgccgcgtgtgtgaagaaggccttcgggttgtaaagcactttaagcagggaggaaggccttgaggttaatacccttgaggattgacgttacctgcagaataagc

SEQ ID NO: 8964 - DNA, 490 bp, unidentified
  misc_feature 1..490: note = Ascusbbf_702858, encodes 16S rRNA
  source 1..490: mol_type = genomic DNA
agagtttgatcctggctcaggatgaacgctagcggcaggcttaacacatgcaagtcgaggggcagcatggtcttcggaccgatggcgaccggcgcacgggtgagtaacgcgtatgcaacctaccttttacagggggatagcccggggaaacccggattaatatcccattgcaccattatctggcatcatttgatggttaaagctgaggcggtaaaagatgggcatgcgtcctattagttagttggtaaggtaacggcttaccaagacagcgataggtaggggtcctgagagggagatcccccacactggtactgagacacggaccagactcctacgggaggcagcagtgaggaatattggacaatgggcgagggcctgatccagccatgccgcgtgcaggaagactgccctatgggttgtaaactgcttttatacgggaagaaacccaccttcgtgaaggtggctgacggtaccgtaagaataaggatcg

SEQ ID NO: 8965 - DNA, 490 bp, unidentified
  misc_feature 1..490: note = Ascusbbf_1615686, encodes 16S rRNA
  source 1..490: mol_type = genomic DNA
agagtttgatcctggctcaggacgaacgctggcggcgtgcttaacacatgcaagtggagcgacgaaccagagcttgctctggggcagagccgcgaacgggtgagtaacacgtgggtcacctacctcgatgaccgggacaacccgaggaaactcgggctaatactggatgtgcacttaggtggaaaggtagcctcggcttccgcatcgagatgggcccgcggcgcattagcttgttggtggggtaacggcctaccaaggcgacgatgcgtagctggtctgagaggacgatcagccacactgggactgagacacggcccagactcctacgggaggcagcagtggggaatcttgcgcaatgcgcgaaagcgtgacgcagcaacgccgcgtgggggaagaaggccttcgggttgtaaacctctttcagttgggacgaagcttctgcggtgaatagccgtatggagtgacggtaccttcacaagaagccccggct

SEQ ID NO: 8966 - DNA, 490 bp, unidentified
  misc_feature 1..490: note = Ascusbbf_1891287, encodes 16S rRNA
  source 1..490: mol_type = genomic DNA
agagtttgatcatggctcaggatgaacgctggcggcgtgcctaacacatgcaagtcgaacgggactattcagagatgttttcggactgatctttttagtttagtggcggacgggtgagtaacgcgtggacaacctgcctttcacagggggatagcagctggaaacggctggtaataccgcatacgctcagtgcaccgcatggtgtgctgaggaaagatttatcggtgaaagatggatccgcgtctgattagccagttggcggggtaacggcccaccaaagcgacgatcagtagccggcctgagagggcggacggccacattgggactgagacacggcccagactcctacgggaggcagcagtgggggatattgcacaatgggcgcaagcctgatgcagcgacgccgcgtgagtgaagaagtatttcggtatgtaaagctctatcagcagggaagaaaatgacggtacctgcacaagaagccccggctaac

SEQ ID NO: 8967 - DNA, 490 bp, unidentified
  misc_feature 1..490: note = Ascusbbf_236507, encodes 16S rRNA
  source 1..490: mol_type = genomic DNA
agagtttgatcatggctcagattgaacgctggcggcaggcctaacacatgcaagtcgagcgcgaaagcccttcggggtgagtaaagcggcggacgggtgagtatcgcgtgggaatctaccgagtagtgggggataacgtccggaaacgggcgctaataccgcatacgccctacgggggaaagggggggatcttcggacctctcgctatttgatgagcctgcgtcggattagctagttggtggggtaagggcctaccaaggcgacgatccgtagctggtctgagaggatgatcagccacactgggactgagacacggcccagactcctacgggaggcagcagtggggaatattgcacaatgggcgaaagcctgatgcagccatgccgcgtgtgtgaagaaggctttcgggttgtaaagcactttcagcgaggaggaaggcttgtcggttaataaccggcaggattgacgttactcgcagaagaagcaccgg

SEQ ID NO: 8968 - DNA, 376 bp, unidentified
  misc_feature 1..376: note = Ascusbbf_1738973, encodes 16S rRNA
  source 1..376: mol_type = genomic DNA
agagtttgatcatggctcaggacgaacgctggcggcgtgcctaacacatgcaagtcgaacggagttacttgtttagatcccttcggggtgacgaacttttaacttagtggcggacgggtgagtaacgcgtgagtaacctgcctctgagaggggaataacgttctgaaaagatcgctaataccgcataacatatcgaagtcgcatggctttgatatcaaagattttatcgctcggagatggactcgcgtccgattagctagttggtgaggtaacggcccaccaagtcgacgatcggtagccgacctgagagggtgatcggccacattgggactgagacacggcccaaactcctacgggagccagcagccgcggtaat

SEQ ID NO: 8969 - DNA, 480 bp, unidentified
  misc_feature 1..480: note = Ascusbbf_1092707, encodes 16S rRNA
  source 1..480: mol_type = genomic DNA
agagtttgatcctggctcagaacgaacgctggcggcaggcttaacacatgcaagtcgaacgtgaagtcaccttcgggtgatggaaagtggcagacgggtgagtaacgcgtgggaacctacctaatggtacggaataactcagggaaacttgggctaataccgtatgtgcccgaaaggggaaagatttatcgccattagatgggcccgcgtcggattagctagttggtagggtaacggcttaccaaggcgacgatccgtagctggtctgagaggatgaccagccacactgggactgagacacggcccagactcctacgggaggcagcagtggggaatattggacaatgggcgcaagcctgatccagccatgccgcgtgagtgatgaaggccctagggttgtaaagctctttcggcggggacgataatgacggtaccgggaaaggaagccacggctaaccacgtgccagcagccgcggtaat

SEQ ID NO: 8970 - DNA, 490 bp, unidentified
  misc_feature 1..490: note = Ascusbbf_1504860, encodes 16S rRNA
  source 1..490: mol_type = genomic DNA
agagtttgatcctggctcaggacgaacgctggcggcgtgcttaatacatgcaagtcgagcggggtttatgggtagcttgctaccgataaaccaagcgacggacgggtgagtaacgcgtgggcaacctgccctctagcctgggataacagcgcgaaagtgctgctaacaccggatatgctcacagggagacatctcccggtgagaaaagtttacactagaggatgggcccgcgtcccattagctagttggtgaggtaacggcccaccaaggcgacgatgggtagccgacctgagagggtgatcggccacactgggactgagacacggcccagactcctacgggaggcagcagtagggaattttccgcaatgggcgaaagcctgacggagcaacgccgcgtgagggatgaaggttttcggatcgtaaacctctgtcttcagggacgataatgacggtacctgaggaggaagccacggctaactacgtgccag

SEQ ID NO: 8971 - DNA, 490 bp, unidentified
  misc_feature 1..490: note = Ascusbbf_1583456, encodes 16S rRNA
  source 1..490: mol_type = genomic DNA
agagtttgatcctggctcagagcgaacgctggcggcatgcttaacacatgcaagtcgcacgaaggtttcggccttagtggcggacgggtgagtaacgcgtaggtatctatccatgggtgggggataacactgggaaactggtgctaataccgcatgacacctgagggtcaaaggcgcaagtcgcctgtggaggagcctgcgtttgattagctagttggtggggtaaaggcctaccaaggcgatgatcaatagctggtttgagaggatgatcagccacactgggactgagacacggcccagactcctacgggaggcagcagtggggaatattggacaatgggggcaaccctgatccagcaatgccgcgtgtgtgaagaaggtcttcggattgtaaagcactttaagcgaggaggaggctactttagttaatacctagggatagtggacgttactcgcagaataagcaccggctaactctgtgccagcagcc

SEQ ID NO: 8972 - DNA, 490 bp, unidentified
  misc_feature 1..490: note = Ascusbbf_1827514, encodes 16S rRNA
  source 1..490: mol_type = genomic DNA
agagtttgatcctggctcaggatgaacgctagctacaggcttaacacatgcaagtcgaggggcagcatgtcagtggcttgccactgatgatggcgaccggcgcacgggtgagtaacgcgtatccaaccttccccccagtagggaatagcccggcgaaagtcggattaatgccctatgttttcccttgagagcatttgactgggaacaaagatttatcgctgggggatggggatgcgtctgattagatggtaggcggggtgacggcccacctagtcgacgatcagtaggggttctgagaggaaggtcccccacattggaactgagacacggtccaaactcctacgggaggcagcagtgaggaatattggtcaatggccgggaggctgaaccagccaagtagcgtgcgggacgacggccctatgggttgtaaaccgcttttgccggggaataaagtgtcccacgcgtggggctttgcatgtacccggagaat

SEQ ID NO: 8973 - DNA, 490 bp, unidentified
  misc_feature 1..490: note = Ascusbbf_727368, encodes 16S rRNA
  source 1..490: mol_type = genomic DNA
agagtttgatcctggctcaggataaacgctggcggcgtgcctaacacatgcaagtcgaacggacttagctttgtagcaatacgaggcgaaagttagtggcggacgggtgagtaatgcgtgagcaacctgcccttcggagggggacaacagttggaaacgactgctaataccgcataatgtacggagaggacatcctcaccgtaccaaagatttatcgccgaaggatgggctcacgtctgattagttagttggcggggtaacggcccaccaagaccgcgatcagtagccggactgagaggttgaacggccacattgggactgagatacggcccagactcctacgggaggcagcagtggggaatattgggcaatgggcgcaagcctgacccagcaacgccgcgtgaaggaagaaggctttcgggttgtaaacttcttttaagagggacgaaggacgtgacggtacctcttgaataagccacggctaactacg

SEQ ID NO: 8974 - DNA, 490 bp, unidentified
  misc_feature 1..490: note = Ascusbbf_423495, encodes 16S rRNA
  source 1..490: mol_type = genomic DNA
agagtttgatcctggctcaggattaacgctggcggcgtgcctaatgcatgcaagtcgaacgtggtctcttcggagattaacgtggcggacgggtgaggaacacgtggggaacctgcccattggtggggggtagccctcggaaacgaggggtaattccgcatacgctggcctggggatagcccgggtcaggaaagggtcttcggactcgccgatggaggggcctgcgtccgattagcttgttggtggggtaacggcctaccaaggcgatgatcggtagctggtctgagaggacggccagccacaggggaactgagacacggtccccactcctacgggaggcagcagcaaggagttttccgcaatgggcgaaagcctgacggagcaacgccgcgtgggggatgacgcccttcggggtgtaaaccccttttcttggggacgaagcagtgacggtacccgaggaagaaggcccggctaactacgtgccagcagc

SEQ ID NO: 8975 - DNA, 470 bp, unidentified
  misc_feature 1..470: note = Ascusbbf_211147, encodes 16S rRNA
  source 1..470: mol_type = genomic DNA
agagtttgatcatggctcagaacgaacgctggcggcaggcttaacacatgcaagtcgaacgatggcttcggccagagtggcgcacgggtgagtaacgcgtgggaacctacccttcggtacggaacaacccagggaaacttgggctaataccgtatacggcctcagggcgaaagatttatcgccgagggatgggcccgcgtccgattaggtagttggtggggtaacggcctaccaagcctgcgatcggtacctggtctgagaggatgatcaggcacactgggactgagacacggcccagactcctacgggaggcagcagtggggaatattggacaatgggcgaaagcctgatccagccatgccgcgtgagtgatgaaggccttcgggttgtaaagctctttcacccacgacgatgatgacggtagtgggagaagaagccccggctaacttcgtgccagcagccgcggtaat

SEQ ID NO: 8976 - DNA, 490 bp, unidentified
  misc_feature 1..490: note = Ascusbbf_1772320, encodes 16S rRNA
  source 1..490: mol_type = genomic DNA
agagtttgatcatggctcagattgaacgctggcggcaggcctaacacatgcaagtcgagcggtaaggccctttggggtacacgagtggcgaacgggtgagtaacacgtgagtaacctgccctggactctgggataagcattcgaaagggtgtctaatactggatatgactcatggccgcatggttgtgggtgtaaaggttttctggtctgggatgggctcgcggcctatcagcttgttggtggggtgatggcctaccaaggcgtcgacgggtagccggcctgagagggcgaccggccacactgggactgagatacggcccagactcctacgggaggcagcagtggggaatattgcgcaatgggcggaagcctgacgcagcaacgccgcgtgcgggatgacggccttcgggttgtaaaccgctctcatccatgacgaagggttttcttgacggtagtggaagaagaagcaccggccaactacgtgccagca

SEQ ID NO: 8977 - DNA, 490 bp, unidentified
  misc_feature 1..490: note = Ascusbbf_558036, encodes 16S rRNA
  source 1..490: mol_type = genomic DNA
agagtttgatcatggctcaggatgaacgctggcggcgtgcctaatacatgcaagtgaaacgggtatcttcggataccagtcgcgaacgggtgagtaatacataggcaacctgcctttatgagggggataaccgagggaaactttggctaataccgcatgaagactctaaggcatcttagagggataaaagttgggaaacaacgcatgaagatgggcttatggcgcattagctagttggtgagatagcagcccaccaaggtaatgatgcgtagccgacctgagagggtgaacggccacattgggactgagacacggcccaaactcctacgggaggcagcagtagggaattttcggcaatggggggaaccctgaccgagcaacgccgcgtgaaggaagaaggttttcggattgtaaacttctgttataagggaagaacggattggatagggaatgatctgatagtgacggtaccttattagaaagccacggc

SEQ ID NO: 8978 - DNA, 490 bp, unidentified
  misc_feature 1..490: note = Ascusbbf_535900, encodes 16S rRNA
  source 1..490: mol_type = genomic DNA
agagtttgatcatggctcaggacgaacgctggcggcgtgcctaatacatgcaagtcgagcgagcggaaccaacagatttacttcggtaatgacgttgggaaagcgagcggcggatgggtgagtaacacgtggggaacctgcccctaagtctgggataccatttggaaacaggtgctaataccggataataaagcagatcgcatgatcagcttttgaaaggcggcgtaagctgtcgctaagggatggccccgcggtgcattagctagttggtaaggtaacggcttaccaaggcgacgatgcatagccgagttgagagactgatcggccacattgggactgagacacggcccaaactcctacgggaggcagcagtagggaatcttccacgatggacgcaagtctgatggagcaacgccgcgtgagtgaagaaggttttcggatcgtaaagctctgtccttaggaacgaagaagtgacggtacctgaggagga

SEQ ID NO: 8979 - DNA, 490 bp, unidentified
  misc_feature 1..490: note = Ascusbbf_928766, encodes 16S rRNA
  source 1..490: mol_type = genomic DNA
agagtttgatcctggctcaggatgaacgctagcggcaggcctaacacatgcaagtcgagcgggattcggtggcttgccaccgatgagagcggcgcacgggtgcgtaacgcgtatacaacctaccttttgctacgggatagcccagagaaatttggattaacaccgtatggtataaggatccggcatcgggatcttattaaaggctacggcaaaagatgggtatgcgtcctattagctagatggtgcggtaacggcgcaccatggcaacgataggtaggggccctgagagggggatcccccacactggtactgagacacggaccagactcctacgggaggcagcagtgaggaatattggacaatgggcgaaagcctgatccagccatgccgcgtgcaggaagacggccctatgggttgtaaactgcttttatacgggaagaaacaccccctcgtgagggggcttgacggtaccgtaggaataaggatcggc

SEQ ID NO: 8980 - DNA, 490 bp, unidentified
  misc_feature 1..490: note = Ascusbbf_1752732, encodes 16S rRNA
  source 1..490: mol_type = genomic DNA
agagtttgatcctggctcaggatgaacgctagcggcaggcctaatacatgcaagtcggacgggatccgggagtagctcgctacttccggtgagagtggcgcacgggtgcgtaacgcgtgagcaacctgcccatatcagggggatagcccggagaaatccggattaacaccgcatgacacgccgggacggcatcgttccggcgtcaaatattcataggatatggatgggctcgcgtgacattagctagttggtggggtaacggcccaccaaggcgacgatgtctaggggctctgagaggagaatcccccacactggtactgagacacggaccagactcctacgggaggcagcagtaaggaatattggtcaatgggggcaaccctgaaccagccatgccgcgtgcaggacgactgccctatgggttgtaaactgcttttgccggggaataaaccccactacgtgtagtgggctgaacgtacccggagaataa

SEQ ID NO: 8981 - DNA, 170 bp, unidentified
  misc_feature 1..170: note = Ascusbbf_173009, encodes 16S rRNA
  source 1..170: mol_type = genomic DNA
agagtttgatcctggctcagcatcagagtatccttttctccttctttgtcggtcatgatgacttgttggcccttcaccacataggtgcctttctctgatgatggggctacggccagtgccgctttcatagctttgcgtttcaaccagccgatgccagcagccgcggtaat

SEQ ID NO: 8982 - DNA, 490 bp, unidentified
  misc_feature 1..490: note = Ascusbbf_1441682, encodes 16S rRNA
  source 1..490: mol_type = genomic DNA
agagtttgatcctggctcaggacgaacgctggcggcgtgcctaacacatgcaagtcgaacgaggtccaagagagcttgctctctgaagacctagtggcgaacgggtgagtaacacgtgagaaacctgcctcgaagtggggaataacccggggaaactcgggctaataccgcatatcctcacatgaccgcatggtcgagtgaggaaagaatttcgctttgagagggtctcgcggcctatcagcttgttggcggggtaacggcccaccaaggcaacgacgggtagctggattgagagatcgatcagccacactgggactgagacacggcccagactcctacgggaggcagcagtggggaatcttgcgcaatgggcgaaagcctgacgcagcaacgccgcgtgcgggatgacggccttcgtggttgtaaaccgctttcagcagggacgaaaatgacggtacctgcagaagaagccccggctaactacgtgcca

SEQ ID NO: 8983 - DNA, 490 bp, unidentified
  misc_feature 1..490: note = Ascusbbf_1811207, encodes 16S rRNA
  source 1..490: mol_type = genomic DNA
agagtttgatcctggctcaggatgaacgctggcggcgtgcttaacacatgcaagtcgaacgaagccctcccctccgggggaggagactgagtggcggacgggtgagtaacgcgtgggtaacctgccctgtacagggggataacagccagaaatggctgctaataccgcatgagcgcacgaggaggcatctccttgtgtgaaaaactccggtggtacaggatgggcccgcgtctgattagccagttggcagggtaacggcctaccaaagcgacgatcagtagccggtctgagaggatgaacggccacattggaactgagacacggtccaaactcctacgggaggcagcagtggggaatattgcacaatgggggaaaccctgatgcagcaacgccgcgtgagtgaagaagtatctcgatatgtaaagctctatcagcagggaagatgttgacggtacctgactaagaagctccggctaaatacgtgccagca

SEQ ID NO: 8984 - DNA, 468 bp, unidentified
  misc_feature 1..468: note = Ascusbbf_1597956, encodes 16S rRNA
  source 1..468: mol_type = genomic DNA
agagtttgatcatggctcagaacgaacgctggcggcaggcttaacacatgcaagtcgaacgcccacttcggtgggagtggcagacgggtgagtaacgcgtgggaacatgcccttcggtacggaataactcagggaaacttgtgctaataccgtatacgccccttgggggaaagatttatcgccgaaggattggcccgcgtctgattagctagttggtggggtaatggctcaccaaggcgacgatcagtagctggtctgagaggatgatcagccacactgggactgagacacggcccagactcctacgggaggcagcagtggggaatattggacaatgggcgaaagcctgatccagccatgccgcgagtgatgaaggccctagggttgtaaagctctttcgcctgggaagataatgacggtaccaggataagaagccccggctaacttcgtgccagcagccgcggtaat

SEQ ID NO: 8985 - DNA, 490 bp, unidentified
  misc_feature 1..490: note = Ascusbbf_1856394, encodes 16S rRNA
  source 1..490: mol_type = genomic DNA
agagtttgatcctggctcaggatgaacgctggcggcacgcttaacacatgcaagtcgagcggagctttttcattgcgaagggagtagcttgctacgaacggagcaccgagggagcttagcggcggacgggtgagtaacacgtgggtaacctaccctatacagggggataacgtatagaaatgtacgctaaaaccgcataagcctacaggaccgcatggtgcggtaggaaaatcgttagaggtataggatgggcccgcgactgattagctggttggtgaggtaaaggctcaccaaggcaacgatcagtagccggtctgagaggatgaacggccacattgggactgagacacggcccagactcctacgggaggcagcagtggggaatattgcacaatgggggaaaccctgatgcagcgatgccgcgtgaaggacgaaggttttcggattgtaaacttctatcagcaaggaagaaaatgacagtacttgacta

SEQ ID NO: 8986 - DNA, 490 bp, unidentified
  misc_feature 1..490: note = Ascusbbf_1693907, encodes 16S rRNA
  source 1..490: mol_type = genomic DNA
agagtttgatcctggctcaggatgaacgctagcggcaggcctaacacatgcaagtcgaggggtagaagcagcttgctgctttgagaccggcgcacgggtgcgtaacgcgtatgcaacctaccttatactgagggatagcccagagaaatttggattaatacctcatggtattattgaatggcatcatttgatgattaaagattacggtataagatgggcatgcgtcccattagttagttggtaaggtaacggcttaccaagacgatgatgggtaggggtcctgagagggagatcccccacactggtactgagacacggaccagactcctacgggaggcagcagtgaggaatattggtcaatggaggcaactctgaaccagccatgccgcgtgcaggaataaggtcctatggattgtaaactgcttttgtataggaagaaaccatcccttgcgagggatcttgacggtactatacgaataaggatcggcta

SEQ ID NO: 8987 - DNA, 490 bp, unidentified
  misc_feature 1..490: note = Ascusbbf_1390599, encodes 16S rRNA
  source 1..490: mol_type = genomic DNA
agagtttgatcatgctcaggacgaacgctggcggcgtgcttaacacatgcaagtcgaacgaggtaccaggagagcttgctcgagagggaccgagtggcggacgggtgagtaacgcgtgagcaacctgtctcacacagggggataacgcatcgaaagatgtgctaataccgcgtaggaccacggaggggcatccctttgaggtgaaaggaggaatccggtgtgaggtgggctcgcgtctgattagatagttggtgaggtaacggcccaccaagtcaacgatcagtagccgacctgagagggtgatcggccacattgggactgagacacggcccagactcctacgggaggcagcagtggggaatattgggcaatgggcgaaagcctgacccagcaacgccgcgtgaaggaagaaggttttcggatcgtaaacttctgtccttgttgaagaggaagagacggtaggcaaggaggaagccccggctaactacgt

SEQ ID NO: 8988 - DNA, 346 bp, unidentified
  misc_feature 1..346: note = Ascusbbf_564823, encodes 16S rRNA
  source 1..346: mol_type = genomic DNA
agagtttgatcctggctcagaacgaacgctggcggcaggcttaacacatgcaagttgaacgggatttgatggtagcttgctatcattaatgagagtagcgcactggtgagtaacacgtgggaacgtacattgtagtgggggacaacagctggaaacggttgctaataccgcataatccctgagggggaaagatttatcgctataatatcggcccgcggaagattaggtagttggtggggtaaaggcctaccaagcctacgatctatagctggtctgagaggacgatcagccacattggaactgagacacggtccagactcctacgggagccagcagccgcggtaat

SEQ ID NO: 8989 - DNA, 490 bp, unidentified
  misc_feature 1..490: note = Ascusbbf_596970, encodes 16S rRNA
  source 1..490: mol_type = genomic DNA
agagtttgatcatggctcaggacgaacgctggcggcgtgcttaacacatgcaagtcgaacgctgaagccccagcttgctggggtggatgagtggcgaacgggtgagtaacacgtgagcaacctgcccttcactcttggataagcgctggaaacggtgtctaatactggatatgcatcatggtcgcatggcctgtggtgggaaagatttatcggtgaaggatgggctcgcggcctatcagcttgatggtggggtaatggctcaccatggcgacgacgggtagccggcctgagagggtgaccggccacactgggactgagacacggcccagactcctacgggaggcagcagtggggaatattgcacaatgggcgcaagcctgatgcagcaacgccgcgtgagggatgacggccttcgggttgtaaacctcttttagtagggaagaagcgaaagtgacggtacctgcagaaaaagcaccggctaactacgtgc

SEQ ID NO: 8990 - DNA, 490 bp, unidentified
  misc_feature 1..490: note = Ascusbbf_1598179, encodes 16S rRNA
  source 1..490: mol_type = genomic DNA
agagtttgatcatggctcaggacgaacgctggcggcgtgcttaacacatgcaagtcgagcggtaaggcccttcggggtacacgagcggcgaacgggtgagtaacacgtgagcaatctgcccatcacttcgggataactccgggaaaccggagctaataccgaatatgaccacttcaggcatctgacggtggtggaaagttccggcggtgatggatgagctcgcggcctatcagcttgttggtggggtaacggcccaccaaggcttcgacgggtagccggcctgagagggtgaccggccacactgggactgagacacggcccagactcctacgggaggcagcagtggggaatattggacaatgggcgaaagcctgatccagcaacgccgcgtgagggatgacggccttcgggttgtaaacctctttcacccatgacgaagcgcaagtgacggtagtgggagaagaagcaccggccaactacgtgccagcag

SEQ ID NO: 8991 - DNA, 490 bp, unidentified
  misc_feature 1..490: note = Ascusbbf_818707, encodes 16S rRNA
  source 1..490: mol_type = genomic DNA
ctcttttgctcctggctcaggacgaacgctggcggcgtgcttaacacatgcaagtcgaccgctgccgcccagcttgctgggtggaagagtggcgaacgggtgagtaacacgtgagtaacctgcccttgactctgggataagcgctggaaacggcgtctaatactggatacgagcagcctctgcatgggggttgttggaaagatttatcggttttggatggactcgcggcctatcagcttgttggtgaggtaatggctcaccaaggcgacgccgggtagccggcctgagagggtgaccggccacactgggactgagacacggcccagactcctacgggaggcagcagtggggaatattgcacaatgggcgaaagcctgatgcagcaacgccgcgtgagggatgacggccttcgggttgtaaacctcgtttagtagggaagaagcgcaagtgacggtacctacagaaaaagcaccggctaactacgtgccag

SEQ ID NO: 8992 - DNA, 490 bp, unidentified
  misc_feature 1..490: note = Ascusbbf_524388, encodes 16S rRNA
  source 1..490: mol_type = genomic DNA
agagtttgatcatggctcaggatgaacgctagctacaggcttaacacatgcaagtcgaggggcagcgggaagtcagcttgctgactttgccggcgaccggcgcacgggtgagtaacgcgtatccaacctgcccccgggcagggcacagcccggcgaaagtcggattaatgccctatgctgtccgaagcggacatctaattcggacgaaaggttttttccgtccggggatggggatgcgtatgattagcttgccggcggggtaacggcccaccggggcgacgatcattaggggttctgagaggaaggtcccccacactggtactgagacacggaccagactcctacgggaggcagcagtgaggaatattggtcaatggccgggaggctgaaccagccaagtagcgtgcaggatgacggccctatgggttgtaaactgcttttatcaggggataaagtgacccacgtgtgggtttttgtaggtacctgatga

SEQ ID NO: 8993 - DNA, 490 bp, unidentified
  misc_feature 1..490: note = Ascusbbf_1407733, encodes 16S rRNA
  source 1..490: mol_type = genomic DNA
agagtttgatcatggctcaggacgaacgctggcggcgtgcttaacacatgcaagtcgagcggtaaggcccttcggggtacacgagcggcgaacgggtgagtaacacgtgggtgacctgccctcagctctgggataagcctgggaaaccgggtctaataccggataggacctcggggcgcatgtcctggggtggaaagccagttgctttggtttctggcggttggggatgggcccgcggcctatcagcttgttggtggggtgatggcctaccaaggcggtgacgggtagccggcctgagagggcgaccggccacactgggactgagacacggcccagactcctacgggaggcagcagtggggaatattgcgcaatgggcggaagcctgacgcagcgacgccgcgtgggggatgacggccttcgggttgtaaacctctttcgccggggacgaagctttgtgtgacggtacctggagaagaagcaccggccaa

SEQ ID NO: 8994 - DNA, 490 bp, unidentified
  misc_feature 1..490: note = Ascusbbf_433653, encodes 16S rRNA
  source 1..490: mol_type = genomic DNA
agagtttgatcctggctcaggatgaacgctagctacaggcttaacacatgcaagtcgaggggcagcatggcggtagcaataccgctgatggcgaccggcgcactggtgagtaacacgtatgcaacctgccccgcgcagggggataatccggagaaatctggtctaataccccgtacgccgcgcttccgcatgggagtgcggtgaaaggagcgatccggcgcgggatgggcatgcggcgcattagctagtcggcggggtgacggcccaccgaggcgacgatgcgtaggggttctgagaggaaggtcccccacattggaactgagacacggtccaaactcctacgggaggcagcagtgaggaatattggtcaatgggcgagagcctgaaccagccaagtagcgtgcaggatgacggccctatgggttgtaaactgcttttatatagggataaagtgacccacgtgtgggtttttgtaggtactatatgaata

SEQ ID NO: 8995 - DNA, 490 bp, unidentified
  misc_feature 1..490: note = Ascusbbf_871495, encodes 16S rRNA
  source 1..490: mol_type = genomic DNA
agagtttgatcatggctcagattgaacgctggcggcatgcttaacacatgcaagtcgaacgggggaagtagcttgctattttcctagtggcggacgggtgagtaatgtataggaatctgccttggggtgggggataacgtagggaaacttacgctaataccacataacacttacgagtcaaagcgggggatcttcggacctcgcgcccttagatgagcctatatcggattagctagttggtgaggtaatggctcaccaaggcgacgatccgtagctggtttgagaggatgatcagccacatcgggactgagacacggcccgaactcctacgggaggcagcagtggggaatattggacaatgggggcaaccctgatccagcaatgccgcgtgtgtgaagaaggccttcgggttgtaaagcactttcgttagtgaagaaaggtttatggctaatacctatagatttgacattagctaaagaagaagcaccgg

SEQ ID NO: 8996 - DNA, 490 bp, unidentified
  misc_feature 1..490: note = Ascusbbf_1525333, encodes 16S rRNA
  source 1..490: mol_type = genomic DNA
agagtttgatcctggctcagattgaacgctggcggcaggcctaacacatgcaagtcgagcggcagcacaagggagtttacttctgaggtggcgagcggcggacgggtgagtaatgcctagggatctgcccagtcgagggggataacagttggaaacgactgctaataccgcatacgccctacgggggaaaggaggggaccttcgggccttccgcgattggatgaacctaggtgggattagctagttggtgaggtaatggctcaccaaggcgacgatccctagctattctgagaggatgatcagccacactgggactgagacacggcccagactcctacgggaggcagcagtggggaatattgcacaatgggggaaaccctgatgcagccatgccgcgtgtgtgaagaaggccttcgggttgtaaagcactttcagtagggaggaaagggtaaggttcaatacgccttatctgtgacgttacctacagaag

SEQ ID NO: 8997 - DNA, 490 bp, unidentified
  misc_feature 1..490: note = Ascusbbf_897960, encodes 16S rRNA
  source 1..490: mol_type = genomic DNA
agagtttgatcctggctcagaataaacgctggcggcgtgcctaacacatgcaagtcgagcgagaaaggccttcgggcttagtaaagcggcaaacgggtgagtaacgcgtaagaatctgcctttcagtgaggaataccttcgagaaattgaagttaatactgcatacgtccctacggggagaaagatggcctctttgctgtcgctgaaagatgagcttgcgtactattagctagttggtggggtaaaggcctaccaaggcgtagatagttagccggcttgagagggtgtacggccacactggaactgagatacggtccagacacctacgggaggcagcagtgaggaatattgcgcaatgggcgaaagcctgacgcagcgacgccgcgtggaggatgaaggtcttcggattgtaaacttctgttaagtgggaagaaatactctgttctaataaagcagggcgatgacggtaccattagagaaagcaccggct

SEQ ID NO: 8998 - DNA, 490 bp, unidentified
  misc_feature 1..490: note = Ascusbbf_1218147, encodes 16S rRNA
  source 1..490: mol_type = genomic DNA
agagtttgatcatggctcaggatgaacgctagcggcaggcttaacacatgcaagtcgaggggtaaaaatagcttgctattttgagaccggcgcacgggtgcgtaacgcgtatgcaatctgccttttgcaaagggatagcccagagaaatttggattaataccttatagtatatgattttggcatcagtatcatattaaagatttatcggcaaaagatgagcatgcgtcccattagctagttggtaaggtaacggcttaccaaggctacgatgggtaggggtcctgagagggagatcccccacactggtgctgagacacggaccagactcctacgggaggcagcagtgaggaatattggacaatgggcgcaagcctgatccagccatgccgcgtgcaggatgaagcatctatggtgtgtaagctgcttttatacgggaagaaaccctggctcgtgagccagactgacggtaccgtaagaataaggaccggc

SEQ ID NO: 8999 - DNA, 490 bp, unidentified
  misc_feature 1..490: note = Ascusbbf_1599495, encodes 16S rRNA
  source 1..490: mol_type = genomic DNA
agagtttgatcctggctcagaatgaacgctggcggcgtggattaggcatgcaagtcgaacggacattggggcttgctccaatgttagtggcgacctggtgattacaagttgggcaacctgcccggaagtggggaataactcctcgaaagaggggctaataccgcatgtggtttgggggtcttcggactttctaactaaagcagcgatgcgcttccggatgggcccgactcccattagcttgttggcggggtaatggcccaccaaggctacgatgggtagctggcttgagagagtggccagccacacgaggactgagatacggcctcgactcctacggggggcagcagtctagaggcttcggcaatgggggaaaccctgaccgagcgacgccgcgtggaggatgaaggccttcgggttgtaaactcctttcggccggaaggaaggcctgcatggtgaatgcgggattgaccgaccggcggaagaagccccg

SEQ ID NO: 9000 - DNA, 288 bp, unidentified
  misc_feature 1..288: note = Ascusbbf_1412864, encodes 16S rRNA
  source 1..288: mol_type = genomic DNA
agagtttgatcctggctcaggtgtgaacccggttcaggctctggatctcggaactgattcacagggtacgtcagcattttttaaggataagcaaaatgtggtttaagaatctcagactataccgtctcgccgacaccttcagcactacggcggcagatcttgaaaaggccgtcgggcagaacagattcgagcactgcagcgggcagaacacctcctcaagcggatttgtctccccgttcggccacaggtcggagtcgctcgtgttcagcggccagcagccgcggtaat

SEQ ID NO: 9001 - DNA, 490 bp, unidentified
  misc_feature 1..490: note = Ascusbbf_1321708, encodes 16S rRNA
  source 1..490: mol_type = genomic DNA
agagtttgatcctggctcaggataaacgctggcggcgcacataagacatgcaagtcgaacggacttaactcattcttaacgattgagagcggttagtggcggactggtgagtaatgtctaagtaacctgcctatcagaggggaacaaccgttggaaacgactgctaataccgcatatgccacgagaatcacattgttcaagtgggaaaggagcaatccgctgatagatggacttatatctgattagctagttggtggggtaacggcctaccaaggcgacgatcagtagccggactgggaggttaaacgacgacattgggaccgaggtacggcccagattcatacgagaggcagcaggcgggaagattgcgcaatggaggaaacgctgacgcagtgacgccgcgtgcaggaagaaggttttcggattgtaaactgctgtagacagggaagaaaaaagacagtacctgtagaataagctccggctaactacg

SEQ ID NO: 9002 - DNA, 490 bp, unidentified
  misc_feature 1..490: note = Ascusbbf_1378694, encodes 16S rRNA
  source 1..490: mol_type = genomic DNA
agagtttgatcctggctcaggatgaacgctagcggcaggcttaacacatgcaagtcgaggggtaacgcggggtagcaatactctggcgacgaccggcgcacgggtgcgtcacgcgtatgcaacctacctgtaacaggggtataacggagagaaatttccactaatcccccatattgttagagattcgcatgtttctctaacgaaagcttcggtggttacggatgggcatgcgtgacatgagatagttggtacggtaacggcttaccaaggcgacgatgtctaggggagatgcgagccttatcacacacgctggtactgaggaccggaccagactcctacgggaggcagcagtggggaatattggtcaatggacggaagtctgaaccagccatgccgcgtggaggaagaaggtcctatgggttgtaaactccttttgttcgagagtaataagaggcttgcgagcctcgatgagagtatcggacgaataagc

SEQ ID NO: 9003 - DNA, 490 bp, unidentified
  misc_feature 1..490: note = Ascusbbf_1371959, encodes 16S rRNA
  source 1..490: mol_type = genomic DNA
agagtttgatcctggctcaggatgaacgctagcggcaggcttaacgcatgcaagtcgaggggtaacgcggggtagcaatactctggcgacgaccggcgcacgggtgcgtaacgcgtatgcaacctacctgtaacaggggtataacggagagaaatttccactaattccccatattgttagagattcgcatgtttctctaacgaaagcttcggtggttacggatgggcatgcgtgacattagctagttggtaaggcaacggcttaacaaggcgacgttggctaggggagctgagaggcttatacccaaacctggtactgggacccggaccagattcctacgggaggcagcagtgaggaagagtggtcaatggacggaagtctgaaccagccatgccgcgtggaggaagaaggtcctatgggttgtaaactccttttgttcgagagtaataagaggcttgcgagcctcgatgagagtatcggacgaataagc

SEQ ID NO: 9004 - DNA, 472 bp, unidentified
  misc_feature 1..472: note = Ascusbbf_1342155, encodes 16S rRNA
  source 1..472: mol_type = genomic DNA
agagtttgatcctggctcagagcgaacgctggcggcatgcttaacacatgcaagtcgcacgaaggtttcggccttagtggcggacgggtgagtaacgcataggaatctatccatgggtgggggataactctgggaaactggagctaataccgcatgatacctgatggtaaaaggcgcaagtcgcctgtggaggagcctgcgttcgattagcttgttggtggggtaatggcctaccaaggcgatgatcgatagctcgtctgagaggatgatcagccacactgggactgagacacggcccagactcctgcgggggacagcaatggggaatattggacaagggggacaacccagatccagcaatgccgcgtgtgtgaagaaggttttcggagtgtaaagcacttgcggcggggacgatgatgacggtacccgcagaagaagccccggctaactgcgtgccagcagccgcggtaat

SEQ ID NO: 9005 - DNA, 490 bp, unidentified
  misc_feature 1..490: note = Ascusbbf_125805, encodes 16S rRNA
  source 1..490: mol_type = genomic DNA
agagtttgatcctggctcaggatgaacgctagctacaggcttaacacatgcaagtcgaggggcagcagggatctagcttgctagatttgctggcgaccggcgcacgggtgcgtaacacgtatccaacctacccatggcccggggatagccttccgaaaggaagattaatacccgatggtctcatttcaggacatcctgttatgagtaaagattcatcggcgttggatggggatgcgtccgattagcttgttggcggggcaacggcccaccaaggcttcgatcggtaggggctctgagaggggggtcccccacactggaactgagacacggtccagactcctacgggaggcagcagtgaggaatattggtcaatgggcgagagcctgaaccagccaagtagcgtgagggaggacggccctacgggttgtaaacctcttttgtttgggaataaagtgccgcacgtgtgcggttttgtatgtaccttacgaat

SEQ ID NO: 9006 - DNA, 331 bp, unidentified
  misc_feature 1..331: note = Ascusbbf_68018, encodes 16S rRNA
  source 1..331: mol_type = genomic DNA
agagtttgatcctggctcaggatgaacgctagctacaggcttaacacatgcaagtcgaggggtaacggcccaccaagcccgcgatcagtaggggttctgagaggaaggtcccccacattggaactgagacacggtccaaactcctacgggaggcagcagtgaggaatattggtcaatgggcgagagcctgaaccagccaagtagcgtgcgggacgaaggccctatgggttgtaaaccgcttttacggggggataaagtgagtgacgtgtcattcattgcaggtaccccgcgaataaggaccggctaattccgtgccagcagccgcggtaat

SEQ ID NO: 9007 - DNA, 490 bp, unidentified
  misc_feature 1..490: note = Ascusbbf_723640, encodes 16S rRNA
  source 1..490: mol_type = genomic DNA
agagtttgatcatggctcagattgaacgctggcggcaggcctaacacatgcaagtcgagcgcgaaagttcttcggaatgagtagagcggcggacgggtgagtaacgcgtgggaatctgcccagtagtgggggataacgttccgaaaggagcgctaataccgcatacgccctacgggggaaagggggggatcttcggacctctcgctattggatgagcccgcgtcggattagctagttggtagggtaatggcctaccaaggcgacgatccgtaactggtctgagaggatgatcagtcacactggaactgagacacggtccagactcctacgggaggcagcagtggggaatattggacaatgggggaaaccctgatccagccatgccgcgtgtgtgaagaaggccttagggttgtaaagcactttcagtggggagaaaggcttgttgattaatactcggcgagattgatgttacccacagaagaagcaccgg

SEQ ID NO: 9008 - DNA, 490 bp, unidentified
  misc_feature 1..490: note = Ascusbbf_662367, encodes 16S rRNA
  source 1..490: mol_type = genomic DNA
agatttgatcctggctcaggatgaacgctggcggcgtgcttaacacatgcaagtcgaacggaaaggcctctagcttgctagaggtactcgagtggcgaacgggtgagtaacacgtgggtgatctgccctgcactgtgggataagcctgggaaactgggtctaataccatataggaccgcactttggatggtgtggtggaaagcttttgcggtgtgggatgagcctgcggcctatcagcttgttggtggggtaatggcctaccaaggcggcgacaggtatccggcctgagagggtgtacggacacattgggactgagatacggcccagactcctacgggaggcagcagtggggaatattgcacaatgggcgcaagcctgatgcagcgacgccgcgtgggggatgaaggccttcgggttgtaaactcctttcgctgtcgacgaagccacttgtggtgacggtaggtagataagaagcaccggctaactacgt

SEQ ID NO: 9009 - DNA, 490 bp, unidentified
  misc_feature 1..490: note = Ascusbbf_179773, encodes 16S rRNA
  source 1..490: mol_type = genomic DNA
agagtttgatcatggctcaggatgaacgctggcggcgtgcctaacacatgcaagtcgaacggttaaaccggcttcggccggatatagagtggcgaacgggtgagtaacacgtgaccaacctgccccccgctccgggataacccagggaaacctgcgctaataccggacgatgccgcaagggcgcatgccctcgcggccgaagcccaggcggcgggggatggggtcgcggcccattaggtagacggcggggtaacggcccaccgtgcccgcgatgggtagccgggctgagaggctgatcggccacattgggactgagatacggcccagactcctacgggaggcagcagtggggaattttgcgcaatgggggcaaccctgacgcagcaacgccgcgtgcgggacgaaggccttcgggttgtaaaccgctttcagcggggacgattatgacggtacccgcagaagaagctccggctaactacgtgccagcagc

SEQ ID NO: 9010 - DNA, 490 bp, unidentified
  misc_feature 1..490: note = Ascusbbf_1686186, encodes 16S rRNA
  source 1..490: mol_type = genomic DNA
agagtttgatcctggctcagattgaacgctagcgggatgctttacacatgcaagtcgaacggcagcgcggacttcggtctggcggcgagtggcggacgggtgagtaatgtatcggaacgtgcccagtagcgggggataactacgcgaaagcgtagctaataccgcatacgccctacgggggaaagggggggattcttcggaacctctcactattggagcggccaatatcggattagctagttggtggggtaaaggctcaccaaggcgacgatccgtagctggtttgagaggacgaccagccacactgggactgagacacggcccagactcctacgggaggcagcagtggggaattttggacaatgggggaaaccctgatccagccatcccgcgtgtgcgatgaaggccttcgggttgtaaagcacttttgtcagggaagaaacagcacaggctaatatcctgtgcgaatgacggtacctgaagaataagc

SEQ ID NO: 9011 - DNA, 490 bp, unidentified
  misc_feature 1..490: note = Ascusbbf_1712731, encodes 16S rRNA
  source 1..490: mol_type = genomic DNA
agagtttgatcctggctcaggacgaacgctggcggcgtgcctaacacatgcaagtcgaacgagaatctatggaaggagttttcggacaacggaaatagaggacagtggcggacgggtgagtaacgcgtgagcaacctgcccttcagagggggacaacagagggaaacttctgctaataccgcatgacatcccggggaggcatcttcctgggatcaaagatttgtcgctgagggatgggctcgcgtctgattagctagttggtgaggtaacggctcaccaaggcgacgatcagtagccggactgagaggttgaacggccacattgggactgagatacggcccagactcctacgggaggcagcagtggggaatattgggcaatgggcgcaagcctgacccagcaacgccgcgtgaaggaagaaggctttcgggttgtaaacttcttttatcagggacgaaggatgtgacggtacctgatgaataagccacgg

SEQ ID NO: 9012 - DNA, 490 bp, unidentified
  misc_feature 1..490: note = Ascusbbf_1467921, encodes 16S rRNA
  source 1..490: mol_type = genomic DNA
agagtttgatcctggctcaggataaacgctggcggcgcgcataacacatgcaagtcgagcgagaggagtgacttcggtcacaaatctagcggcggacgggtgagtataatatgaacaacctgccttacagagggggatagccggaagaaatttcgattaataccgcatattttaagatagtcgcatgattattttaagaaagtccgaaaggacgctgtaagaggggtttgtatccgattagctagttggagtggtaacggcacaccaaggcgacgatcggtagctggttcgagaggatgtacagccacattgggactgagatacggcccagactcctacgggaggcagcagtggggaatattgcgcaatggaggaaactctgacgcagcgacgccgtgtaaaggaagaaggtcttcggatcgtaaacttatatcgattatgaaaagtaaggatggtaataaagtaagaagccccggctaactacgtgcca

SEQ ID NO: 9013 - DNA, 490 bp, unidentified
  misc_feature 1..490: note = Ascusbbf_345145, encodes 16S rRNA
  source 1..490: mol_type = genomic DNA
agagtttgatcatggctcaggatgaacgctggcggcgtgcttaacacatgcaagtcgaacgaatttctttcgaagtgcggcttcggccaagcgacgaatgaagtgagtggcggacgggtgagtaacgcgtgggtaacctgccttacactgggggataacgattggaaacgatcgctaataccgcataagaccacggtgccgcatggcacaggggtaaaagaatttcgatgtaagatggacccgcgtctgattaggcagttggcgaggtaacggctcaccaaaccgacgatcagtagccgacctgagagggtgatcggccacattgggactgagacacggcccaaactcctacgggaggcagcagtggggaatattgcacaatgggggaaaccctgatgcagcgacgccgcgtgagtgaagaagtatttcggtatgtaaagctctatcagcagggaagacaatgacggtacctgactaagaagctccggct

SEQ ID NO: 9014 - DNA, 490 bp, unidentified
  misc_feature 1..490: note = Ascusbbf_643932, encodes 16S rRNA
  source 1..490: mol_type = genomic DNA
agagtttgatcctggctcaggacgaacgctggcggcgtgcctaacacatgcaagtcgaacggagttaagacttcggttttaacttagtggcgaacgggtgagtaacgcgtgagaaacctacctttcagtgggggacaacagttggaaacgactgctaataccgcataatgttatttgggggcatccctgaataaccaaagatttattgctgaaagatggtctcgcgtctgattagctagttggtgaggtaacggctcaccaaggcgacgatcagtagccggtctgagaggatgaacggccacattgggactgagatacggcccagactcctacgggaggcagcagtggggaatattgggcaatgggggaaaccctgacccagcaacgccgcgtgaaggaagaaggccttcgggttgtaaacttcttttaccagggacgaaaaaagtgacggtacctggagaaaaagcaacggctaactacgtgccagcag

SEQ ID NO: 9015 - DNA, 490 bp, unidentified
  misc_feature 1..490: note = Ascusbbf_1571879, encodes 16S rRNA
  source 1..490: mol_type = genomic DNA
agagtttgatcatggctcagattgaacgctggcggcatgctttacacatgcaagtcgaacggcagcacgggtgcttgcacctggtggcgagtggcgaacgggtgagtaatacatcggaacgtgcctggtagtgggggataactgctcgaaagagcagctaataccgcatgagatctaaggatgaaagcaggggaccttcgggccttgtgctaccagagcggctgatggcagattaggtagttggtggggtaaaggcttaccaagcctgcgatctgtagctggtctgagaggacgaccagccacactgggactgagacacggcccagactcctacgggaggcagcagtggggaattttggacaatgggcgcaagcctgatccagcaatgccgcgtgcaggatgaaggcctttgggttgtaaactgcttttgtacggaacgaaaagtacttctctaatacagaggtgcgatgacggtaccgtaagaataagc

SEQ ID NO: 9016 - DNA, 486 bp, unidentified
  misc_feature 1..486: note = Ascusbbf_657817, encodes 16S rRNA
  source 1..486: mol_type = genomic DNA
agagtttgatcctggctcagaacgaacgctggcggcatgcttaacacatgcaagtcgaacggtaatgtatagtacttgtattatatattatagtggcaaacgggtgagtaacgcgtggggacgtacccttcagtaatgaataacggatggaaacgtacgctaatacattatagaattgagagatgaaagagagatcgctgagggagcggcccgcgttagattaggtagttagtggggtaaaggcctaccaagccgatgatctatagctggtctgagaggatgatcagccacattgggactgagatacggcccagactcctacgggaggcagcagtggggaatattggacaatgggggaaaccctgatccagcgatgccgcgtgagtgaagaaggccttcgggttgtaaagctcttttataagtggagataatgacggtaacttatgaataagctccggcaaacttcgtgccagcagccgcggtaat

SEQ ID NO: 9017 - DNA, 490 bp, unidentified
  misc_feature 1..490: note = Ascusbbf_716829, encodes 16S rRNA
  source 1..490: mol_type = genomic DNA
agagtttgatcatggctcaggacgaacgctggcggcatgcctaacacatgcaagtcgaacgggactcttaacgaccgaggcttcggccaagtgaattatgagtttagtggcggacgggtgagtaacgcgtgagcaacctgcctttcagagggggacaacagttggaaacgactgctaataccgcatgacatacagagggggcatcctttctgtatcaaagatttatcgctgaaagatgggctcgcgtctgattagatagttggcggggcaacggcccaccaagtcgacgatcagtagccggactgagaggttgaacggccacattgggactgagatacggcccagactcctacgggaggcagcagtggggaatattggtcaatgggggcaaccctgaaccagcaatgccgcgtgaaggaagaaggccttcgggttgtaaacttctttgacgagggacgataatgacggtacctcgaaaacaagccacggc

SEQ ID NO: 9018 - DNA, 490 bp, unidentified
  misc_feature 1..490: note = Ascusbbf_853732, encodes 16S rRNA
  source 1..490: mol_type = genomic DNA
agagtttgatcatggctcaggatgaacgctggcggcgtgcctaatacatgcaagtcgaacgcactagtttactagtgagtggcgaacgggtgagtaacacgtgggtaacctgcccttaagacgaggataaccattggaaacgatggctaagactggataggaatatttgaggcatcttaaatattttaaaagacctagcaataggtatgcttaaggaggggcctgcggcgcattagttagttggtgaggtgagagctcaccaagacgatgatgcgtagccggactgagaggttgaacggccacattgggactgagaaacggcccaaactcctacgggaggcagcagtagggaattttcggcaatggaggaaactctgaccgagcaacgccgcgtgaatgacgaagtacttcggtatgtaaagttcttttatcagggaagaatgggcagtggaaaaactgttttgacggtacctgatgaataagccccggc

SEQ ID NO: 9019 - DNA, 490 bp, unidentified
  misc_feature 1..490: note = Ascusbbf_1562959, encodes 16S rRNA
  source 1..490: mol_type = genomic DNA
agagtttgatcctggctcagaacgaacgctggcggcatgcctaacacatgcaagtcgaacggtaaggccccttcgggggtacacgagtggcgaacgggtgagtaacacgtgggtaacctgcccttcactgggggataaccgagggaaacctcggctaataccgcataatgtgctttctcataagtgaaagcaccaaaactccggtggtgaaggatgggcccgcggcagattagctagttggtggggtaaaggcctaccaaggcaacgatctgtagctggtttgagaggacgatcagccacactgggactgagacacggcccagactcctacgggaggcagcagtggggaatcttgcgcaatgggcgaaagcctgacgcagcaatgccgcgtgagggacgaaggtcttaggatcgtaaacctctttcagtagggacgaaaacagacggtacctacagaagaagccccggctaactacgtgccagcagccgc

SEQ ID NO: 9020 - DNA, 469 bp, unidentified
  misc_feature 1..469: note = Ascusbbf_671740, encodes 16S rRNA
  source 1..469: mol_type = genomic DNA
agagtttgatcatggctcagaacgaacgctggcggcaggcctaacacatgcaagtcgagcgcccccttcggggggagcggcagacgggtgagtaacgcgtgggaacctacccagtggtacggaataactcggggaaacccgtgctaataccgtatacgcccttcgggggaaagatttatcgccattggatgggcccgcgtctgattagcttgttggtgaggtaacggctcaccaaggcgacgatcagtagctggtctagaggatgatcagccacactgggactgagacacggcccagactcctacgggaggcagcagtggggaatattggacaatgggcgaaagcctgatccagccatgccgcgtgagtgaagaaggccttagggttgtaaagctctttcaccagggaagataatgacggtacctggagaagaagccccggctaactccgtgccagcagccgcggtaat

SEQ ID NO: 9021 - DNA, 490 bp, unidentified
  misc_feature 1..490: note = Ascusbbf_1612974, encodes 16S rRNA
  source 1..490: mol_type = genomic DNA
agagtttgatcctggctcagagtgaacgctggcggcgtgcttaacacatgcaagtcgaacggatgaaataagcttgcttatttcgttagtggcgcacgggtgagtaatgtatagttaacctgccctttagtgggggacaacagttggaaacgactgctaataccccatattccttcttatcataaggtaagttgggaaagatttattgctaaaggatggggctttatggtatcagctagttggtggggtaacggcctaccaaggctatgacgcctacctggtctgagaggatgatcaggcacactggaactgagacacggtccagactcctacgggaggcagcagtggggaatattgcacaatggaggaaactctgatgcagcaacgccgcgtggaggatgacgcatttcggtgtgtaaactccttttataagggaagataatgacggtaccttatgaataagcaccggctaactccgtgccagcagccg

SEQ ID NO: 9022 - DNA, 484 bp, unidentified
  misc_feature 1..484: note = Ascusbbf_1666542, encodes 16S rRNA
  source 1..484: mol_type = genomic DNA
agagtttgatcatggctcagaacgaacgctggcggcaggcttaacacatgcaagtcgagcgaggacttcggtcctagcggcggacgggtgagtaacgcgtgggaacgtgcccctttcttcggaatagcctcgggaaactgggagtaatgccgaatacgccggatcatcgcgagatggtttgggaaagatttatcggagagggatcggcccgcgttggattaggtagttggtggggtaatggcctaccaagccgacgatccatagctggtttgagaggatgatcagccacactgggactgagacacggcccagactcctacgggaggcagcagtggggaatcttggacaatgggggaaaccctgatccagccatgccgcgtgaacgatgaaggccttagggttgtaaagttctttcagcggggaagataatgactgtacccgcagaagaagccccggctaactccgtgccagcagccgcggtaat

SEQ ID NO: 9023 - DNA, 490 bp, unidentified
  misc_feature 1..490: note = Ascusbbf_1090563, encodes 16S rRNA
  source 1..490: mol_type = genomic DNA
agagtttgatcctggctcaggacgaacgctggcggcgtgcttaacacatgcaagtcgaacggacgcggaggagcttgctcctccaagttagtggcgaacgggtgagtaacgcgtgagcaacctgaccttcagagggggataacatctggaaacaggtgctaataccgcatgagaccacagcaccgcatggtaaaggggtcaaaggagcaatccgctgaaggaggggctcgcgttccattagatagttggtgaggtaacggcccaccaagtcgacgatgggtagccgagctgagaggctgatcggccacactggaactgagacacggtccagactcctacgggaggcagcagtggggaatattgggcaatgggcgaaagcctgacccagcaacgccgcgtgagggaagaaggtcttcggattgtaaatctctgtcgcaggggacgaaggaagtgacggtaccctgtgaggaagccccggctaactacgtgc

SEQ ID NO: 9024 - DNA, 490 bp, unidentified
  misc_feature 1..490: note = Ascusbbf_1495340, encodes 16S rRNA
  source 1..490: mol_type = genomic DNA
agagtttgatcctggctcaggataaacgctggcggcgcacataagacatgcaagtcgaacggaagccgttataaatgaaacggattgaagatttatcagattgaagtagattttataacaatgactttagtggcggactggtgagtaacgcgtgagcaacctgcctattagaggggaataacagtgagaaatcattgctaataccgcataagcttgtaggaatgcatgttctagcaagaaaaggagaaatccgctaatagatgggctcgcgtctgattagctagttggtgtggtaacggcataccaaggcaacgatcagtagccgagctgagaggctctacggccacattgggactgagatacggcccagactcctacgggaggcagcagtcgggaatattgcgcaatggaggaaactctgacgcagtgacgccgcgtataggaagaaggttttaggattgtaaactattttagacagggaagagaaaag

SEQ ID NO: 9025 - DNA, 488 bp, unidentified
  misc_feature 1..488: note = Ascusbbf_402683, encodes 16S rRNA
  source 1..488: mol_type = genomic DNA
agagtttgatcctggctcaggacgaacgctggcggcgtgcttaacacatgcaagtcgagcgggaaacttcggtttccagcggcggacgggtgagtaacacgtgggcaacctgcctcacaataggggatagccctccgaaaggaggattaataccctataacacaaggaaaacgcatgttttctttgccaaagaatttcgttgtgagatgggcccgcggcgcattagcttgttggtgaggtaacggctcaccaaggcttcgatgcgtagccgacctgagagggtgatcggccacattggaactgagacacggtccagactcctacgggaggcagcagtggggaatattgcacaatggaggaaactctgatgcagcaacgccgcgtgagtgatgaaggtcttcggattgtaaaactctgtcttatgggacgataatgacggtaccataggaggaagccacggctaactacgtgccagcagccgcggtaat

SEQ ID NO: 9026 - DNA, 488 bp, unidentified
  misc_feature 1..488: note = Ascusbbf_1511520, encodes 16S rRNA
  source 1..488: mol_type = genomic DNA
agagtttgatcatggctcaggacgaacgctggcggcgttcctaatacatgcaagtcgagcgggtgcagcaatgcatcagcggcggacgggtgagtaacgcgtgggcaatctgccctctagcctgggataatagttcgaaaggactgctaacaccggatatgctcactagggagacatctcccggtgaggaaagtttacactagaggatgagcccgcgtcccattagctagttggtgaggtaacggcccaccaaggcgacgatgggtagccgacctgagagggtgatcggccacactgggactgagacacggcccagactcctacgggaggcagcagtagggaattttccgcaatgggcgcaagcctgacggagcaacgccgcgtgagggatgaaggttttcggatcgtaaacctctgtcttcagggacgataatgacggtacctgaggaggaagccacggctaactacgtgccagcagccgcggtaat

SEQ ID NO: 9027 - DNA, 488 bp, unidentified
  misc_feature 1..488: note = Ascusbbf_1272452, encodes 16S rRNA
  source 1..488: mol_type = genomic DNA
agagtttgatcctggctcagggctaacgctggcggcgcgcctaacacatgcaagtcgaacgggcacttcggtgctagtggcagacgggtgagtaacgcgtgagcaacgtgccttctttctggggataccgtttggaaacgaacgttaataccgaatgtgcccatactgtggcatcgcagtatgtgtaaactattagggagaggagagcggctcgcgttctatcagctagatggtggggtaatggcctaccatggctacgacggataactggtctgagaggatgatcagtcacactggaactgagacacggtccagactcctacgggaggcagcagtgaggaatcttgcacaatgggcgaaagcctgatgcagcgacgccgcgtgagggacgaaggccttcgggttgtaaatctctgtcagtggggaagaagaatgacggtacccactgaggaagcttcggctaactacgtgccagcagccgcggtaat

SEQ ID NO: 9028 - DNA, 490 bp, unidentified
  misc_feature 1..490: note = Ascusbbf_919857, encodes 16S rRNA
  source 1..490: mol_type = genomic DNA
agagtttgatcctggctcaggacgaacgctggcggtgtgcctaatacatgcaagtagaacgctgaagaggagcttgctccttggatgagttgcgaacgggtgagtaacgcgtaggtaacctaccttatagcgggggataactattggaaacgatagctaataccgcataacaatgattgccgcatggcagtgatttgaaaggcgcaattgcgtcactatgagatggacctgcgttgtattagctagttggtgaggtaagggctcaccaaggcgacgatacatagccgacctgagagggtgatcggccacactgggactgagacacggcccagactcctacgggaggcagcagtagggaatcttcggcaatggacgaaagtctgaccgagcaacgccgcgtgagtgaagaaggttttcggatcgtaaagctctgttgtaagtcaagaatagatgtgagagtggaaagttcacattatgacggtagcttacc

SEQ ID NO: 9029 - DNA, 490 bp, unidentified
  misc_feature 1..490: note = Ascusbbf_451673, encodes 16S rRNA
  source 1..490: mol_type = genomic DNA
agagtttgatcatggctcaggacgaacgctggcggcgtgcttaacacatgcaagtcgagcggtaaggctccttcgggagtacacgagcggcgaacgggtgagtaacacgtgagtaatctacccttcacatcggaataaccccgggaaactggggctaataccggatatcacagcggatggcatcattcgctgttgaaagctccggcggtgagggatgagctcgcggcctatcagctagttggtgaggtaacggcccaccaaggcgacgacgggtagccggcctgagagggtgaccggccacactgggactgagacacggcccagactcctacgggaggcagcagtggggaatattggacaatgggcggaagcctgatccagcaacgccgcgtgagggatgacggccttcgggttgtaaacctctttcagcagggacgaagcgaaagtgacggtacctgcagaagaagcaccggccaactacgtgccagca

SEQ ID NO: 9030 - DNA, 490 bp, unidentified
  misc_feature 1..490: note = Ascusbbf_1244574, encodes 16S rRNA
  source 1..490: mol_type = genomic DNA
agagtttgatcctggctcaggatgaacgctggcggcgtgcctaatacatgcaagtcgaacgaagcacttcggtgcttagtggcgaacgggtgagtaacacgtaggtaacctaccctatagtttggaataacagttggaaacgactgctaataccaaatgagtaacaagaaggcatcttctagttataaaagatcctcatgggatcgctatgggaggggcctgcggcgcattagttagttggtgaggtaaaggctcaccaagacagtgatgcgtagccggactgagaggttgaacggccacactgggactgagacacggcccagacacctacgggaggcagcagtagggaattttcggcaatgggggaaaccctgaccgagcaacgccgcatgaacgaagaagcacctaggtgtgtaaagttcttttataagggaagaatggctaatgtaggaaatgacattagaatgacggtaccttttgaataagcccc

SEQ ID NO: 9031 - DNA, 490 bp, unidentified
  misc_feature 1..490: note = Ascusbbf_702399, encodes 16S rRNA
  source 1..490: mol_type = genomic DNA
agagtttgatcatggctcagaatgaacgctggcggcgtgcctaacacatgcaagtcgagcgagaaagatcttcggatcgagtacagcggcggacgggtgagtaacgcgtgagaatctgcctttcagtgaagaatactctcgagaaatcgaggttaatgctgcatacgtctcgaaagagagaaagatggcctcttgctgtcgctgaaagatgagcttgcgtactattagctagttggtggggtaaaggcctaccaaggcgatgatggttagccggcctgagagggtgtacggccacattggaactgagacacggtccagactcctacgggaggcagcagtggggaatattgcgcaatgggcgaaagcctgacgcagcgacgccgcgtggaggatgaaggtcttcggatcgtaaactcctgttaagtgggaggaaagaacgagctttaatacagctcggtgatgactgtaccattagagaaagcaccggcta

SEQ ID NO: 9032 - DNA, 490 bp, unidentified
  misc_feature 1..490: note = Ascusbbf_1633652, encodes 16S rRNA
  source 1..490: mol_type = genomic DNA
gagtttgatcatggctcaggatgaacgctagcggcaggcttaacacatgcaagtcgaggggtaacgcgaggtagcaatactttggcgacgaccggcgcacgggtgcgtaacgcgtatgcaacctacctgtagcagggggataacggagagaaatttccactaataccccattttgtcattccttcgcatgttgggatgacgaaagcttcggtggttacggatgggcatgcgtgacattagctagttggcggggcaacggcccaccaaggcgacgatgtctaggggagctgagaggcttatcccccacacaggtactgagacacggaccagactcctacgggaggcagcagtgaggaatattggtcaatggacggaagtctgaaccagccatgccgcgtggatgaagaaggtcctatgggttgtaaactccttttgttcgagagtaataagtgggatgcgtcccacgatgagagtatcggacgaataagca

SEQ ID NO: 9033 - DNA, 470 bp, unidentified
  misc_feature 1..470: note = Ascusbbf_1419765, encodes 16S rRNA
  source 1..470: mol_type = genomic DNA
agagtttgatcctggctcagaacgaacgctggcggcaggcttaacacatgcaagtcgaacgcattcttcggaatgagtggcagacgggtgagtaacgcgtgggaacgtacctttcagttcggaataacccagggaaacttgggctaataccggatacgcccgagaggggaaagatttattgctgagagatcggcccgcgtctgattagctagttggtggggtaaaggctcaccaaggcgacgatcagtagctggtctgagaggatgatcagccacattgggactgagacacggcccaaactcctacgggaggcagcagtggggaatattggacaatgggcgcaagcctgatccagccatgccgcgtgagtgatgacggcctcagggttgtaaagctctttcgcacgcgacgataatgacggtagcgtgagaagaagccccggctaacttcgtgccagcagccgcggtaat

SEQ ID NO: 9034 - DNA, 471 bp, unidentified
  misc_feature 1..471: note = Ascusbbf_1568733, encodes 16S rRNA
  source 1..471: mol_type = genomic DNA
agagttgatcatggctcaggataaacgttggcggcgtgcctaatgcatgcaagtcgcacggagcttcggctcagtggcggacgggtgagtaacacgtaggaacctgcccagaagtgggggataactcctcgaaagaggagctaataccgcatgtggtctacggaccaaagcagcaatgcgcttctggaggggcctgcggtggattagctagttggtggggtaatggcctaccaaggcgacgatccatagctggtctgagaggacggccagccacactgggactgagacacggcccagactcctacgggaggcagcagcaaggaattttccgcaatcgacgcaagtcggacggagcaacgccgcgtgcgggaagacggccttcgggttgtaaaccgcttttgtgagggaagaagatctgacggtacctcacgaataagtcacggctaactacgtgccagcagccgcggtaat

SEQ ID NO: 9035 - DNA, 490 bp, unidentified
  misc_feature 1..490: note = Ascusbbf_1124549, encodes 16S rRNA
  source 1..490: mol_type = genomic DNA
agagtttgatcatggctcagaacgaacgctggcggcgtgcctaacacatgcaagtcgaacggaagtagcaatactttagtggcgcacgggtgagtaacgcatgggtaacctgccctatggattgggatagctacgcgaaagtgtaggtaataccggataagctgaagtgattttttcatttcaggaaaggctagccgcaaggccggcgccaaaggatgggctcatgtcctattagctagttggtggggtaacggcccaccaggcgaagatgggtaactggtctgagaggacgatcagtcacactggaactgagacacggtccagactcctacgggaggcagcagtggggaatattgcacaatgggggaaaccctgatgcagcaacgccgcgtgagtgatgaaggccttcgggttgtaaagctctttcggctgggaagaagggtcatttggtgaatagccaggtgacttgatggtaccagaagaagaagca

SEQ ID NO: 9036 - DNA, 490 bp, unidentified
  misc_feature 1..490: note = Ascusbbf_604027, encodes 16S rRNA
  source 1..490: mol_type = genomic DNA
agagtttgatcctggctcaggatgaacgctagctacaggcttaacacatgcaagtcgaggggcagcataacgaaagcttgcttttgttgatggcgaccggcgcacgggtgagtaacgcgtatccaaccttccccttagtagggcatagcccggcgaaagtcggattaataccctatgttatccgtcgaggacatctgaagtggattaaagatttatcgctaagggatggggatgcgtctgattaggttgttggcggggtaacggcccaccaagccatcgatcagtaggggttctgagaggaaggtcccccacattggtactgagacacggaccaaactcctacgggaggcagcagtgaggaatattggtcaatgggcgagagcctgaaccagccaagtagcgtgcaggatgacggccctatgggttgtaaaccgcttttgagtgagagcaataaggatcatgagtggtccgatgagagtatcattcgaat

SEQ ID NO: 9037 - DNA, 490 bp, unidentified
  misc_feature 1..490: note = Ascusbbf_1587439, encodes 16S rRNA
  source 1..490: mol_type = genomic DNA
agagtttgatcctgcctcaggataaacgctggcggcgtgcctaatgcatgcaagtcgaacgggaagcccttcggggctcgaccgtggcggacgggtgaggagcacgtagctaacctgccctggtgtgggggatatccttcggaaacggagtgtaataccgcatgtgctcagttgaggggacttgactgaggaaagccgagaggcgtaccaggagggggctgcgtccgattagctagttggtgtggtaatggcgcaccaaggcgatgatcggtcgctggtctgagaggacgatcagccacacggggactgagacacggccccgactcctacgggaggcagcagcaaggaattttccacaatgggcgcaagcctgatggagcaacgctgcgtgcgggatgacgcccttcggggtgtaaaccgcttttcgaggggacgaaggcaatgacggtaccctcggaataaggatcggctaactacgtgccagcagctg

SEQ ID NO: 9038 - DNA, 490 bp, unidentified
  misc_feature 1..490: note = Ascusbbf_1566511, encodes 16S rRNA
  source 1..490: mol_type = genomic DNA
agagtttgatcctggctcaggatgaacgctagcggcaggcctaatacatgcaagtcgaacgagatcaagagcttcggttcttggtttagtggcgcacgggtgcgtaacgcgtatgcaacctaccttccacagggggatagcccaccgaaaggtggattaataccgcataacacgaatgggtggcatcacctgctcgccaaagatttatcggtggtagatgggcatgcgtgccattagttagttggtagggtaacggcctaccaagacttcgatggctaggggttctgagaggatggtcccccacactggtactgagacacggaccagactcctacgggaggcagcagtagggaatattgggcaatggaagagattctgacccagccatgccgcgtgcaggaagaaggccttctgggttgtaaactgcttttatctgggaagaaaacgcccctgcgggggtaactgacggtaccagatgaataagcaccgg

SEQ ID NO: 9039 - DNA, 472 bp, unidentified
  misc_feature 1..472: note = Ascusbbf_565566, encodes 16S rRNA
  source 1..472: mol_type = genomic DNA
agagtttgatcatggctcagaacgaacgctggcggcaggcttaatacatgcaagtcgaacggttgtagcaatacagcagtggcagacgggtgagtaacacgtgggaacctacctaggggtacggaataactcagggaaacttgtgctaataccgtatacgacctcagggtgaaagatttatcgcccctagatgggcccgcgttggattagctagttggtgaggtaaaagctcaccaaggcgacgatccatagctggtctgagaggatgatcagccacactgggactgagacacggcccagactcctacgggaggcagcagtagggaatcttggacaatgggcgaaagcctgatccagccatgccgcgtgagtgatgaaggccttagggttgtaaagctctttcgccagggaagataatgacggtacctggataagaagccccggctaacttcgtgccagcagccgcggtaat

SEQ ID NO: 9040 - DNA, 490 bp, unidentified
  misc_feature 1..490: note = Ascusbbf_1509420, encodes 16S rRNA
  source 1..490: mol_type = genomic DNA
agagtttgatcatggctcaggatgaacgctggcggcgtgcctaatacatgcaagtcgaacgcactagtttactagtgagtggcgaacgggtgagtaacacgtgggtaatctacccttaagacgaggataacagttggaaacggctgctaatactggataggtatatttgaggcatcttgaatatattaaagatttatcgcttaaggaggagcctgcggcgcattagttagttggtggggtaaaagcctaccaagacgatgatgcgtagccggactgagaggttgaacggccacattggaactgagaaacggtccaaactcctacgggaggcagcagtagggaattttcggcaatggggggaaccctgaccgagcaacgccgcgtgattgaagaagctcttcggagcgtaaagatcttttattggggaagaaaaaaatgacggtacccaatgaataagccccggctaactatgtgccagcagccgcggtaa

SEQ ID NO: 9041 - DNA, 487 bp, unidentified
  misc_feature 1..487: note = Ascusbbf_510303, encodes 16S rRNA
  source 1..487: mol_type = genomic DNA
agagtttgatcctggctcaggatgaatgctggcggcgtgtctaaggcatgcaagtcgaatgtctagtttactaggcatggcaaacgggagagtaacacattgataacttaccctgaagacggggataaccttgcgaaagcgagaataatacccgatagtatgtaatcacaaaagtgattccattaaagttccggcgcttcaggagaggtctatggcctatcagcttgttggtgaggtaatagctcaccaaggcaacgacgggtatcgggcgcgagagcgtgatccgactcactgggactgagaaactgcccagactcctacgggaggctgcagtcaagaatcttcctcaatggacgaaagtctgaaggagcgacgccgcgtgtatgaagaagcctttcggggtgtaaagtacttttaactgtgaaaaaacaatgatggtaacagttgaataaggggctgctaacctcgtgccagcagccgcggtaat

SEQ ID NO: 9042 - DNA, 484 bp, unidentified
  misc_feature 1..484: note = Ascusbbf_490557, encodes 16S rRNA
  source 1..484: mol_type = genomic DNA
agagtttgatcctggctcagaacgaacgctggcggcaggcttaacacatgcaagtcgagcgctcccttcggggagagcggcggacgggtgagtaacgcgtgggaatatgcccgaaggtacggaataaccgctggaaacggcgactaatgccgtatgtgccctgccatggagacatggtgggggaaagatttatcgccttcggattggcccgcgtcggattaggtagttggtggggtaatggccttccaagccgacgatccgtagctggtttgagaggatgatcagccacactgggactgagacacggcccagactcctacgggaggcagcagtggggaatcttggacaatgggggcaaccctgatccagccatgccgcgtgagcgaagaaggccttagggttgtaaagctctttcacccgcgaagataatgacggtagcgggagaagaagccccggctaactccgtgccagcagccgcggtaat

SEQ ID NO: 9043 - DNA, 490 bp, unidentified
  misc_feature 1..490: note = Ascusbbf_1598128, encodes 16S rRNA
  source 1..490: mol_type = genomic DNA
agagtttgtctggctcaggacgaacgctggcggcgtgcctaatacatgcaagtcgagcgaactctttaaaagcttgcttttgaagagttagcggcggacgggtgagtaacacgtgggcaacctgcctataagactgggataacttcgggaaaccggagctaataccggataattcttttctactcatgtagaaaagctgaaagacggtttacgctgtcacttatagaagggcccgcggcgcattagctagttggtgaggtaacggctcaccaaggccacgatgcgtagccgacctgagagggtgatcggccacactgggactgagacacggcccagacacctacgggaggcagcagtagggaatcttccgcaatggacgaaagtctgacggagcaacgccgcgtgagtgatgaaggttttcggatcgtaaaactctgttgttagggaagaacaagtacgagagtaactgctcgtaccttgacggtaccta

SEQ ID NO: 9044 - DNA, 490 bp, unidentified
  misc_feature 1..490: note = Ascusbbf_565492, encodes 16S rRNA
  source 1..490: mol_type = genomic DNA
agagtttgatcctggctcaggacgaacgctggcggcgtgcttaacacatgcaagtcgaacggtgttcaggatgtagtaatacagcctgaacatagtggcggacgggtgagtaacgcgtgaggaacctgccttaaagagggggacaacattcggaaacggatgctaatatcgcataagaccccagtgccgcatggcacagaggtcaaaggagcaatctactttaagatggactcgcgtcccattagctagttggtgagataaaggctcaccaaggcaacgatgggtagccgacctgagagggtgatcggccacactggaactgagatacggtccagactcctacgggaggcagcagtggggaatattgggcaatgggcgaaagcctgacccagcaacgccgcgtgaaggaagaagatcttcggattgtaaacatctgtcctatgggaagaagaagtgacggtaccataggaggaagccccggctaactacg

SEQ ID NO: 9045 - DNA, 485 bp, unidentified
  misc_feature 1..485: note = Ascusbbf_407258, encodes 16S rRNA
  source 1..485: mol_type = genomic DNA
agagtttgatcctggctcagaatgaacgctggcggtatgcttaacacatgcaagtcgaacgaattctcctggagcttgcttcaggaaagttagtggcaaacgggtgagtaacacgtgggaatctacctatcagtacggaataacatttggaaacaaatgctaataccgtataccctctaaggaggaaagatttatcgctgatagatgagcccgcgcaagattaggtagttggtagggtaatggcctaccaagtctatgatcttagctgatttgagaggatgatcagccacgctgggactgagacacggcccagactcctacgggaggcagcagtggggaatattggacaatgggcgaaagcctgatccagcaataccgcgtgaacgatgaaggccttagggttgtaaagttcttttagtagggaagataatgacggtacctacagaaaaagccccggctaactccgtgccagcagccgcggtaat

SEQ ID NO: 9046 - DNA, 490 bp, unidentified
  misc_feature 1..490: note = Ascusbbf_1683602, encodes 16S rRNA
  source 1..490: mol_type = genomic DNA
agagtttgatcctggtcaggacgaacgctggcggcgtgcctaatacatgcaagtcgaacgctttttctttcaccggagcttgctccaccgaaagaaaaagagtggcgaacgggtgagtaacacgtgggtaacctgcccatcagaaggggataacacttggaaacaggtgctaataccgtataacactattttccgcatggaagaaagttgaaaggcgcttttgcgtcactgatggatggacccgcggtgcattagctagttggtgaggtaacggctcaccaaggcaacgatgcatagccgacctgagagggtgaccggccacattgggactgagacacggcccagactcctacgggaggcagcagtggggaatattgcacaatggaggaaactctgatgcagcgacgccgcgtgagtgaagaagtatttcggtatgtaaagctctatcagcagggaagaagacgacggtacctgactaagaagccccggc

SEQ ID NO: 9047 - DNA, 490 bp, unidentified
  misc_feature 1..490: note = Ascusbbf_898661, encodes 16S rRNA
  source 1..490: mol_type = genomic DNA
agagtttgatcatggctcaggacgaacgctggcggcgtgcctaacacatgcaagtcgaacggagctgcttggatcgagacttcggtcaagtgaattgcagcttagtggcgaacgggtgagtaacgcgtgagcaacctgcctttcagagggggacaacagttggaaacgactgctaataccgcataatacaggatgggggcatccccgacctgtcaaagatttatcgctgaaagatgggctcgcgtctgattagctagttggtggggtaacggcccaccaaggcgacgatcagtagccggactgagaggttgaacggccacattgggactgagatacggcccagactcctacgggaggcagcagtggggaatattgggcaatgggggaaaccctgacccagcaacgccgcgtgaaggaagaaggccttcgggttgtaaacttcttttaccagggacgaagacgtgacggtacctggagaaaaagccacggc

SEQ ID NO: 9048 - DNA, 490 bp, unidentified
  misc_feature 1..490: note = Ascusbbf_1457960, encodes 16S rRNA
  source 1..490: mol_type = genomic DNA
agagtttgatcctggctcaggacgaacgctggcggcgtgcctaacacatgcaagtcgaacggagaacatttagcaataggtgttcttagtggcggacgggtgagtaacgcgtgagcaatctgcccttcggagggggacaacagctggaaacggctgctaataccgcataatgtatataggtggcatcatcgatataccaaagattcatcgccgaaggatgagctcgcgtctgattagctagttggtagggtaatggcctaccaaggctgcgatcagtagccggactgagaggttgaacggccacattgggactgagatacggcccagactcctacgggaggcagcagtggggaatattgggcaatgggggaaaccctgacccagcaacgccgcgtgaaggaagaaggctttcgggttgtaaacttctttgacgagggaagaaagaaatgacggtacctcgaaaacaagccacggctaactacgtgccagc

SEQ ID NO: 9049 - DNA, 490 bp, unidentified
  misc_feature 1..490: note = Ascusbbf_1586521, encodes 16S rRNA
  source 1..490: mol_type = genomic DNA
agagtttgatcctggctcaggacgaacgctggcggcgcgcttaacacatgcaagtcgagcgagaaccagtccttcgggactggggacagcggcgaacgggtgagtaacacgtgggtaatctgccctcgattctgggatagcccggggaaacccggattaataccggatagcctctcgagcttacgagctcgtgagaaaaggtagcttcggcctccgatcgaggatgagcccgcggcggattagcttgttggtggggtaatggcccaccaaggcgacgatccgtagcaggtctgagaggacgatcagccacactgggactgagacacggcccagactcctacgggaggcagcagtggggaatcttgcgcgatgggcgaaagcctgacgcagcgacgccgcgtgggggaagaaggccttcgggttgtaaacctctttcagcagggacgaagccactcgggtgaatagcccagagggtgacggtacctgcaga

SEQ ID NO: 9050 - DNA, 490 bp, unidentified
  misc_feature 1..490: note = Ascusbbf_1322134, encodes 16S rRNA
  source 1..490: mol_type = genomic DNA
agagtttgatcatggctcaggatgaacgctagctacaggcttaacacatgcaagtcgaggggtaacgtgagagaagcttgcttctcttgacgacgaccggcgaatgggtgagtaacgcgtatccaacctgccgcacgcccgggaacagcccttggaaacgaggattaaatcccgataccttattattccgcatggagtgataagaaaacaggcatgcgatggggatgcgtctgattagcttgttggcggggtaacggcccaccaaggcgacgatcagtacgggttctgagaggaaggtccccagcgttggaactgagacacggaccaaaatcctacgggaggaagccgtgaggaatattggtcaatgggcgcgagcctgaaccagccaagtagcgtgcaggatgacggccctatgggttgtaaactgcttttgcatgggaataaagtgagggacgtgtccctttttgtatgtaccatgagaataaggacc

SEQ ID NO: 9051 - DNA, 490 bp, unidentified
  misc_feature 1..490: note = Ascusbbf_901094, encodes 16S rRNA
  source 1..490: mol_type = genomic DNA
agagtttgatcctggctcaggatgaacgctggcggcgtgcctaacacatgcaagtcgaacggggttaagtgaaattttcggatggaccttaacttagtggcggacgggtgagtaacgcgtgggtaacctgccttatacagggggataacagccggaaacggctgctaataccgcataagcgcacagtgctgcatggtacggtgtgaaaagatttatcggtataagatggacccgcgtctgattagctagttggtaaggtaacggcctaccaaggcaacgatcagtagccggcttgagagagtgaacggccacattgggactgagacacggcccaaactcctacgggaggcagcagtggggaatattgcacaatgggggaaaccctgatgcagcgacgccgcgtgagtgaagaagtatttcggtatgtaaagctctatcagcagggaagaacgggaggcaactcctttgacggtacctgactaagaagccc

SEQ ID NO: 9052 - DNA, 490 bp, unidentified
  misc_feature 1..490: note = Ascusbbf_498509, encodes 16S rRNA
  source 1..490: mol_type = genomic DNA
agagtttgatcctggctcaggatgaacgctagctacaggcttaacacatgcaagtcgaggggaaacgatattgaaagcttgctttctttaggcgtcgaccggcgaatgggtgagtaacgcgtatccaacctgcccctgagtaagggatagcccatcgaaagatggattaataccttatagtctcctttgcagacatctaattaggagtaaagattcatcgcctcgggatggggatgcgtaggattaggcaggcggcggggtaacggcccaccgcgccgacgatccttaggggttctgagaggaaggtcccccacactggtactgagacacggaccagactcctacgggaggcagcagtgaggaatattggtcaatggacgagagtctgaaccagccaagtagcgtgcaggacgacggccctatgggttgtaaactgcttttatgcggggataaagtgcgccacgtatggtgtattgcaggtaccgcaaga

SEQ ID NO: 9053 - DNA, 482 bp, unidentified
  misc_feature 1..482: note = Ascusbbf_1764596, encodes 16S rRNA
  source 1..482: mol_type = genomic DNA
agagtttgatcctggctcaggatgaacgctggcggcgtgcctaatacatgcaagtcgagcggaaaggccacttcggtggtactcgagcggcggacggctgagtaacgcgtaggaacgtaccccaaactgagggataagcaccagaaatggtgtctaataccgcatgtgctctttcgagagtaaagcttcggcggtttgggaacggcctgcgtaagattagcttgttggtgaggtaatggctcaccaaggcgacgatctttagctggtctgagaggatgatcagccagactgggactgagacacggcccagactcctacgggaggcagcagtagggaattttccacaatgggcgaaagcctgatggagcaacgccgcgtgcaggatgaatgccttcgggttgtaaactgcttttatctgtgaagattatgacggtaacagatgaataaggatcggctaactccgtgccagcagccgcggtaat

SEQ ID NO: 9054 - DNA, 472 bp, unidentified
  misc_feature 1..472: note = Ascusbbf_1671498, encodes 16S rRNA
  source 1..472: mol_type = genomic DNA
agatttgatcatggctcaggatgaacgctggcggcgtgcctaatacatgcaagtcgagcggtaacacttcgggtgacgagcggcggacggctgagtaacacgtaggaacgtaccccaaactgagggataactgcccgaaagggtagctaataccgcatatggtcttcggattaaagcttcggcggtttgggaacggcctgcgcatgattagttagttggtgaggtaaaagctcaccaagacgacgatcattagctggtctgagaggatgatcagccagactgggactgagaacggcccagactcctacgggaggcagcagtagggaattttccacaatggacgaaagtctgatggagcaacgccgcgtgcaggatgaagggtttcggctcgtaaactgcttttgtctgtgacgattatgacggtagcagacgaataaggatcggctaactccgtgccagcagccgcggtaat

SEQ ID NO: 9055 - DNA, 490 bp, unidentified
  misc_feature 1..490: note = Ascusbbf_1078300, encodes 16S rRNA
  source 1..490: mol_type = genomic DNA
agagtttgatcctggctcagattgaacgctggcggcatgcttaacacatgcaagtcgaacggcagcaagacctagcttgctaggttgatggcgagtggcgaacgggtgagtaacgcgtaggaatatgccttgaagtgggggacaacctggggaaactcaggcaaataccgcataagctctgaggagtgaagctggggaccttatggcctggcgctttgagattagcctgcgtccgattagctagttggtggggtaagggcctaccaaggcgacgatcggtagctggtctgagaggatgatcagccacactgggactgagacacggcccagacccctacgggaggcagcagtggggaatattggacaatggggggaaccctgatccagcaatgccgcgtgtgtgaagaaggcctgagggttgtaaagcactttcggtggggaggatggaatggtaggttaagagctgactgttctgacgttacccaaagaa

SEQ ID NO: 9056 - DNA, 490 bp, unidentified
  misc_feature 1..490: note = Ascusbbf_1435714, encodes 16S rRNA
  source 1..490: mol_type = genomic DNA
agagtttgatcctggctcaggatgaacgctagcggcaggcttaacacatgcaagtcgaggggcagcgcggggtagcaatactctggcggcgaccggcggaagggtgcgtaacgcgtgagcaacttgcccgtcactgggggataggcactggaaacggtgtgtaatactccataacatttggattcacatggattcatattgaaagattcgttggtgacggatgggctcgcgtaacattagctagtcggcggggtaacggcccatcgaggctacgatgtttaggggttctgagaggaagttccccggaaatggaactgagacacggtccagattccaacggggggcagaggtgaggaagatgggtcaatgggcggaagcctgaaccagccatgccgcgtgtaggaataaggccctatgtgtcgtaaactgcttttccttgagggcaataagggtcacgtgtggtccgatgagagtatcaggggaataagca

SEQ ID NO: 9057 - DNA, 490 bp, unidentified
  misc_feature 1..490: note = Ascusbbf_1342088, encodes 16S rRNA
  source 1..490: mol_type = genomic DNA
agagtttgatcctggctcaggatgaacgctggcggcgtgcttaacacatgcaagtcgaacggagttatctcgctgaggagagcttgctcaaatcctgagataacttagtggcggacgggtgagtaacgcgtggataacctgccttatactgggggataacacttagaaataggtgctaataccgcataagcgcacgttcccgcatgggaaagtgtgaaaaactccggtggtgtaagatggatccgcgtctgattagatagttggtgaggtaacggcccaccaagtcaacgatcagtagccggcctgacagagtgaccgacaaccagcggactgggacacggcccaaacacctacggtaggcagcagtggggaatattgcacaatcggggaaaccctgatgcagcgacgccgcgtgagtgaagaagtatttcggtatgtaaagctctatcagcaaggaagaaaaaaatgacggtacttgactaagaagccc

SEQ ID NO: 9058 - DNA, 490 bp, unidentified
  misc_feature 1..490: note = Ascusbbf_1591839, encodes 16S rRNA
  source 1..490: mol_type = genomic DNA
agagtttgatcatggctcaggatgaacgctagctacaggcctaacacatgcaagtcgaggggcagcatgggagaagcttgcttttcctgatggcgaccggcgaatgggtgagtcacgcgtgtccaacctgcctccggcccggggatagcccttggaaatgaggattaagacccgatacgtggcgcttccgcatggcggcgccatgaaacgagaccggagatggggacgcgtccgattagatagttggcggggcaacggcccaccaagtcaacgatcggtagccggactgagaggttgaacggccacattggaactgagaaacggtccagactcctacgggaggcagcagtggggaatattgggcaatgggcgaaagcctgatgcagcaacgccgcgtgagggaagaaggtcttcggattgtaaacctttgtccttgctgacgaataaagtgacggtaagcaaggaggaagtcacggctaactacgtgcca

SEQ ID NO: 9059 - DNA, 490 bp, unidentified
  misc_feature 1..490: note = Ascusbbf_1346533, encodes 16S rRNA
  source 1..490: mol_type = genomic DNA
agagtttgatcctggctcaggatgaacgctagcggcaggcttaacacacgcaagtcgaggggcagcgaggggtagcaatactctgtcggcgaccggcgaaagggtgagtaacgcgtgagcaacatgcccgttgcagggggatagtcattggaaacgatgcgtaataccccgtaacatcatggaccgcatggtttatgattgaaagatttatcggcgacggattggctcgcgtaccattagctagatggcggggtaacggcccaccatggctacgatggttaggggttctgagaggaaggtccccaacattggaatggagaacagggccagaatcctacgggaggaagcagtgaggaatattggtcaatggccgagaggctgaaccagccatgccgcgtgcgggaggacggtcctatgggttgtaaaccgcttttttgtgggagcaataagttgcacgtgtgcaatgatgagagtaccatgagaataagca

SEQ ID NO: 9060 - DNA, 488 bp, unidentified
  misc_feature 1..488: note = Ascusbbf_137835, encodes 16S rRNA
  source 1..488: mol_type = genomic DNA
agagtttgatcctggctcaggacaaacgctggcggcgtgcctaacacatgcaagtcgaacgagcccttcggggctagtggcagacgggtgagtaacgcgtaggtaatgtacctcttcgctggggataccgttccgaaaggaacgttaataccgaatgaattcttcgggcggcatcgcttgaagaataaaccgcaagggcgaggagatcagcttgcgtactatcagctagtaggtggggtaacggcctacctaggctgcgacggttagccggtctgagaggatgatcggccacattggaactgaaacacggtccagactcctacgggaggcagcagtgaggaatattgcgcaatgggcgaaagcctgacgcagcgacgccgcgtgagggatgacggccttcgggttgtaaacctctgtcagtggggaagagaacggacggtacccgctgaggaagcatcggcttactacgtgccagcagccgcggtaat

SEQ ID NO: 9061 - DNA, 490 bp, unidentified
  misc_feature 1..490: note = Ascusbbf_128553, encodes 16S rRNA
  source 1..490: mol_type = genomic DNA
agagtttgatcctggctcaggatgaacgctggcggcgtgcctaatacatgcaagtcgaacgcgagccttcgggctcgagtggcgaacgggtgagtaatacgtaagcaacctggcctttacagggggataactgatggaaacgtcagctaagaccgcataggtacagagatcgcatgataactgtattaaaagtgctacgggactggtagaggatgggcttacggcgcattagcttgttggaggggtaacggcccaccaaggcgacgatgcgtagccgacctgagagggtgaccggccacactgggactgagacacggcccagactcctacgggaggcagcagtagggaattttcggcaatggggggaaccctgaccgagcaacgccgcgtgaaggaagaaggaattcgttctgtaaacttctgttataaaggaagaacggcacatatagggaatgatatgtgagtgacggtactttatgaggaagccacg

SEQ ID NO: 9062 - DNA, 490 bp, unidentified
  misc_feature 1..490: note = Ascusbbf_1543789, encodes 16S rRNA
  source 1..490: mol_type = genomic DNA
agagtttgatcctggctcaggacgaacgctggcggcgtgcctaatacatgcaagtcgagcggggtccatccagtggcaacactggggacgacctagcggcgaacgggtgagtaacacgtaaggaacctgccccgaagtctgggataactcgaggaaactcgtgctaataccggatgcccccactgcaatcgcatggttgtgtggggaaagttttttcgcttcgggagggccttgcggcctatcagctagttggtggggtaacggcctaccaaggcgtcgacgggtagctggtctgagaggacgatcagccacactggggctgagacacggcccagactcctacgggaggcagcagtagggaatcttgcgcaatgggcgaaagcctgacgcagcaacgccgcgtgggggatgaaggctctcgggttgtaaacccctttcagcagggacgaaattgacggtacctgcagaagaagccccggccaactacgtg

SEQ ID NO: 9063 - DNA, 490 bp, unidentified
  misc_feature 1..490: note = Ascusbbf_1512828, encodes 16S rRNA
  source 1..490: mol_type = genomic DNA
agagtttgatcctggctcaggatgaacgctggcggcgtgcttaacacatgcaagtcgaacggagcaccctagaaggagttttcggacaactgataggaatgcttagtggcggacgggtgagtaacgcgtgaggaacctgcctaggagtggggaataacacagtgaaaattgtgctaataccgcataacatattggtgtcgcatggcactgatatcaaagatttatcgctcttagatggcctcgcgtctgattagctagtaggtggggtaacggcccacctaggcgacgatcagtagccggactgagaggttgaccggccacattgggactgagacacggcccagactcctacgggaggcagcagtggggaatattgggcaatgggcgcaagcctgacccagcaacgccgcgtgaaggaagaaggctttcgggttgtaaacttcttttaagagggacgaagtaagtgacggtacctcttgaataagccacg

SEQ ID NO: 9064 - DNA, 490 bp, unidentified
  misc_feature 1..490: note = Ascusbbf_704402, encodes 16S rRNA
  source 1..490: mol_type = genomic DNA
agagtttgatcatggctcaggatgaacgctagctacaggcctaacacatgcaagtcgaggggcatcgcggtggtgagcgatcaccactggcggcgaccggcggatgggtgagtaacgcgtatccaacctgccccaagcccgggcacagcccctggaaacggggagtgactcccgatagtgcgtgtatcccgcatgggttgcgcgctaaattctgaggcttgggatgggggtgcgtccgattaggtagttggcggggcaacggcccaccaagcctacgatcggtaggggttctgagaagaaggtcccccacattgggactgagacacggcccaaactcctacgggaggcagcagtgaggaatattggtcaatgggcggaagcctgaaccagccaagtagcgtggaggatgacggccctacgggttgtaaactcctttagcgcggggataacatgcgccacgtgtggtgcactgcaggtaccgcgagaataa

SEQ ID NO: 9065 - DNA, 490 bp, unidentified
  misc_feature 1..490: note = Ascusbbf_1475855, encodes 16S rRNA
  source 1..490: mol_type = genomic DNA
agagtttgatcatggctcaggatgaacgctggcggcgtgcctaacacatgcaagtcgaacggaactgcatatgaagattaacttcggttatgattcgcttgtagtttagtggcggacgggtgagtaacgcgtgagtaacctgcccttgagagggggataacgccctgaaaagagcgctaataccgcataacattactttgtcgcatggcagagtaatcaaaactccggtgctcagggatggactcgcgtccgattagttagttggtgaggtaacggctcaccaagacgacgatcggtagccggactgagaggttgaacggccacattgggactgagacacggcccagactcctacgggaggcagcagtgggggatattgcgcaatgggggaaaccctgacgcagcaacgccgcgtggatgaagacggttttcggattgtaaagcactttcggcggggacgatgatgacggtacccgcagaagaagccccg

SEQ ID NO: 9066 - DNA, 486 bp, unidentified
  misc_feature 1..486: note = Ascusbbf_41992, encodes 16S rRNA
  source 1..486: mol_type = genomic DNA
agagtttgatcatggctcagaacgaacgctggcggcatgcttaacacatgcaagtcgaacggtggagggtagtacttgtattacctgacatagtggcaaacgggtgagtaacgcgtgggaatgtaccccttggtgttggataacggttggaaacgaacgctaatacaacataatgtcgagagacaaaagagaaattgctgagggaacagcccgcgttagattaggtagttggtagggtaatggcttaccaagcctgtgatctatagctggtctgagaggatgatcagccacattgggactgagacacggcccagactcctacgggaggcagcagtggggaatattggacaatgggggaaaccctgatccagcgatgccgcgtgagtgatgaaggccttcgggttgtaaagctcttttataaatgaagatgatgacggtaatttatgaataagctccggctaacttcgtgccagcagccgcggtaat

SEQ ID NO: 9067 - DNA, 490 bp, unidentified
  misc_feature 1..490: note = Ascusbbf_158224, encodes 16S rRNA
  source 1..490: mol_type = genomic DNA
agagtttgatcctggctcaggacgaacgctggcggcgtgcctaacacatgcaagtcgaacggacttaaagagcttgctctttaagttagtggcggacgggtgagtaacgcgtgagtaacctgccttacagagggggataacgttttgaaaagaacgctaataccgcataacgtacggatatcgcatggtgaccgtaccaaaggagcgatccgctgtaagatggactcgcgtccgattagatagttggcggggtaacggcccaccaagtcgacgatcggtagccggactgagaggttgatcggccacattgggactgagacacggcccagactcctacgggaggcagcagtgagggatattgcacaatgggcgaaagcctgatgcagcaacgccgcgtgagggaagacggttttcggattgtaaacctctgttcttgctgatgataatgacattaggcaaggagaaagccacggctaactacgtgccagca

SEQ ID NO: 9068 - DNA, 490 bp, unidentified
  misc_feature 1..490: note = Ascusbbf_220358, encodes 16S rRNA
  source 1..490: mol_type = genomic DNA
agagtttgatcatggctcagattgaacgctggcggcaggcttaacacatgcaagtcgaacgatgaggtctagcttgctagactgattagtggcgaacgggtgagtaaagcttaggaatctgccttgtagtgggggacaacatttcgaaagggatgctaataccgcatgagacctaggggtgaaagggtgcgaaagcacttgctacaagatgagcctaagttagattagctagatggtggggtaaaggcctaccatggcgacgatctatagctggtcttagaggatgatcagccacactgggactgagacacggcccagactcctacgggaggcagcagtggggaatattggacaatgggcgaaagcctgatccagccatgccgcgtgtgtgaagaaggccttttggttgtaaagcactttaagtggggaggagggtacttgagttaatagcttgagatactggacgttacccacagaataagcaccggct

SEQ ID NO: 9069 - DNA, 490 bp, unidentified
  misc_feature 1..490: note = Ascusbbf_286622, encodes 16S rRNA
  source 1..490: mol_type = genomic DNA
agagtttgatcatggctcagattgaacgctagcgggatgctttacacatgcaagtcgaacggcagcacgagagagcttgctcttttggtggcgagtggcggacgggtgagtaatgtatcggaacgtgcccagtagcgggggataactactcgaaagagtggctaataccgcatacgccctacgggggaaagggggggatcgcaagacctctcactattggagcggccgatatcggattagctagttggtggggtaaaggcctaccaaggcgacgatccgtagctggtttgagaggacgaccagccacactgggactgagacacggcccagactcctacgggaggcagcagtggggaattttggacaatgggggaaaccctgatccagccatcccgcgtgtgtgatgaaggccttcgggttgtaaagcacttttgacagggaagaaatgacaggagctaataacttctgtagatgacggtacctgtagaat

SEQ ID NO: 9070 - DNA, 470 bp, unidentified
  misc_feature 1..470: note = Ascusbbf_151019, encodes 16S rRNA
  source 1..470: mol_type = genomic DNA
agagtttgatcctggctcagattgaacgctggcggcatggttaaaacatgcaagtcgaacgatcccttcggggagagtggcgaaagggcgaggaatacgatcgaacgtaccccgaggtgggggatagcgtggggaaactcacggtaataccccatgtcctctacggagaaaaggtttaccgccttgggagcggcgatcgtcctatcaggtagttggcggggtaatggcccaccaagccgaagacgggtagcgggtgtgagagcacgacccgccgcatcgggactgagacactgcccggactcctacgggaggctgcagtaacgaatcttccgcaatggacgaaagtctgacggagcaatgccgcgtgtgggatgaagcgtcttcgacgtgtaaaccactgtcagggtttaggaacaatgaccagacccaaaggaagggccggctaactctgtgccagcagccgcggtaat

SEQ ID NO: 9071 - DNA, 470 bp, unidentified
  misc_feature 1..470: note = Ascusbbf_1645125, encodes 16S rRNA
  source 1..470: mol_type = genomic DNA
agagtttgatcatggctcagagcgaacgctggcggcaggcttaacacatgcaagtcgaacggttccttcggggacagtggcagacgggtgagtaacacgtgggaacgtaccttttggttcggaacaactgagggaaacttcagctaataccggatacgcccttatggggaaagatttatcgccgaaagatcggcccgcgtctgattagctagttggtgaggtaatggctcaccaaggcgacgatcagtagctggtctgagaggatgatcagccacactgggactgagacacggcccagactcctacgggaggcagcagtggggaatattggacaatgggggcaaccctgatccagccatgccgcgcgagtgatgaaggccttagggctgtaaagctcttttatccgggacgataatgacggtaccagaagaataagccccggctaacttcgtgccagcagccgcggtaat

SEQ ID NO: 9072 - DNA, 490 bp, unidentified
  misc_feature 1..490: note = Ascusbbf_297799, encodes 16S rRNA
  source 1..490: mol_type = genomic DNA
agagtttgatcctggctcagaacgaacgctggcggcatggattaggcatgcaagtcgaacgcaaacagcaatgtttgagtggcgcaagggtgaggaacacgtgagtaatctgccttcgagtcgggaatagctccgggaaactggaattaataccggatgaaactgcgataccgcatggtattgcattgaaagcagcaatgcgcttgaagaggagctcgcgtcccattagctggttggtgaggtaacggcccaccaaggcgatgatgggtagctggtctgagaggacgatcagccacagtgggactgagaactgcccacactcctacgggaggctgcagtcgagaattttgggcaatgggcgaaagcctgacccagcaatgccgcgtgcgggatgaaggtcttcggattgtaaaccgctgtcaagagggacgaaaaatgacggtacctctgaaggaagtcacggctaactacgtgccagcagccgcggtaa

SEQ ID NO: 9073 - DNA, 490 bp, unidentified
  misc_feature 1..490: note = Ascusbbf_383542, encodes 16S rRNA
  source 1..490: mol_type = genomic DNA
agagtttgatcatggctcagaatgaacgttggcggcgtggattaggcatgcaagtcgcgcggtaggttttccttcgggagaactgagagcggcgaaagggagagtaacgcgtggataacctgcctctaggaccgggatagccgggggaaaccccgggtaataccggatgaagtctccggactaaatggtgtgattccgcctagagatgggtccgcgtcctattagctagttggtgaggtaacggctcaccaaggcgatgatgggtactgggtgtgagagcatggcccagctcactgggactgagatactgcccagacacctacgggtggctgcagtcgagaatcttcggcaatgggcgcaagcctgaccgagcgacgccgcgtgcgggatgaaggccttcgggttgtaaaccgctgtcagaggggaggaaatgagtaggggttatcccctgcacttgaccgatcctcagaggaagtacgggctaagttcg

SEQ ID NO: 9074 - DNA, 490 bp, unidentified
  misc_feature 1..490: note = Ascusbbf_1538100, encodes 16S rRNA
  source 1..490: mol_type = genomic DNA
agagtttgatcatggctcaggatgaacgctggcggcgtgcttaacacatgcaagtcgaacgaggttagagtcttcggactttaaccgagtggcggacgggtgagtaacgcgtgaacaatccgtcctgcaaagggggataacaactggaaacagttgctaataccgcataagaccacagtatcgcatggtacagaggtaaaagcagcaatgcgatgcagggtgagttcgcgtctgattaggcagttggcggggtaacggcccaccaaaccgacgatcagtagccgacctgagagggtgatcggccacattgggactgagacacggcccagactcctacgggaggcagcagtggggaatattgggcaatgggcgcaagcctgacccagcaacgccgcgtgagggaagaaggttttcggattgtaaacccctgtccttgtagacgaaggaagtgacggtatacaaggaggaagccccggctaactacgtgcca

SEQ ID NO: 9075 - DNA, 490 bp, unidentified
  misc_feature 1..490: note = Ascusbbf_1021582, encodes 16S rRNA
  source 1..490: mol_type = genomic DNA
agagtttgatcctggctcagagcgaacgttcgcggcgggcctaacacatgcaagtcgaacgcgaaagcccttcggggtgagtaaagtggcgcacgggtgagtaacgcgtgggtaatctaccttccgacgggggataactattcgaaaggatagctaataccgcataagctcacggcccttacgggggcagggagaaaaggtggcctctgcttgcaagctaccatcggaaggcgagcctgcgtcccatcagctagttggtagggtaatggcctaccaaggcgaagacgggtagctggtctgagaggatgatcagccacactggcactggaacacgggccagactcctacgggaggcagcagtgaggaatattgggcaatgggcgaaagcctgacccagccacgccgtgtgagtgatgaaggccttcgggttgtaaagctctgtaagagagggacgaaaatccttgttcgaataggacgagggattgacggt

SEQ ID NO: 9076 - DNA, 490 bp, unidentified
  misc_feature 1..490: note = Ascusbbf_484074, encodes 16S rRNA
  source 1..490: mol_type = genomic DNA
agagtttgatcctggctcaggacgaacgctggcggcgtgcctaacacatgcaagtcgaacggagccatggaaaagattccttcgggatgattttccggaagcttagtggcggacgggtgagtaacgcgtgagtaacctgcccttgagagggggataacacaccgaaaggtgtgctaataccgcataacatattgaagccgcatgactttaatatcaaagatttattgctcaaggatggactcgcgtctgattagctagttggtgaggtaacggctcaccaaggcgacgatcagtagccgaactgagaggttgatcggccacattgggactgagacacggcccagactcctacgggaggcagcagtgggggatattgcgcaatgggggaaaccctgacgcagcaacgccgcgtgaaggatgaaggtcttcggatcgtaaacttttgtcttatgggaagaaacctgacggtaccataggaggaagccacggc

SEQ ID NO: 9077 - DNA, 490 bp, unidentified
  misc_feature 1..490: note = Ascusbbf_202800, encodes 16S rRNA
  source 1..490: mol_type = genomic DNA
agagtttgatcatggctcaggacgaacgctggcggcgtgcctaacacatgcaagtcgagcggggacatgagggaataagcttcggcagaaagaatcatgtttcagcggcggacgggtgagtaacgcgtgagcaatctgtccctgacagggggataacacttggaaacaggtgctaataccgcataagaccacgagatggcatcatcttggggtaaaagtggagacacggtgaggggtgagctcgcgtccgattagccagttggtgaggtaacggcccaccaaagcgacgatcggtagccgacctgagagggtgatcggccacattggaactgagacacggtccaaactcctacgggaggcagcagtgggaatattgggcaatgggcgaaagcctgacccagcaacgccgcgtgagggaagaaggttttcggattgtaaacctctgtccttggtgacgaaggacgtgacggtagccaaggaggaagccccg

SEQ ID NO: 9078 - DNA, 241 bp, unidentified
  misc_feature 1..241: note = Ascusbbf_194910, encodes 16S rRNA
  source 1..241: mol_type = genomic DNA
agagtttgatcctggctcaggatgaacgctagcggcaggcttaacacatgcaagtcgaggaggcagcagtgaggaatattggtcaatgggcggaagcctgaaccagccatgccgcgtgcaggaataaggccctacgggtcgtaaactgcttttgtacgggagcaataagggccacgtgtgacctgatgagagtaccgtacgaataagcatcggctaactccgtgccagcagccgcggtaat

SEQ ID NO: 9079 - DNA, 490 bp, unidentified
  misc_feature 1..490: note = Ascusbbf_1466690, encodes 16S rRNA
  source 1..490: mol_type = genomic DNA
agagtttgatcatggctcaggatgaacgctagctacaggcttaacacatgcaagtcgaggggcagcacgtctgggtggcgaccggcgcacgggtgagtaacgcgtatccaacctggcccatagtagggaacagcccggcgaaagtcggattaatgccctatgttttcctcatggagcattttatgaggaacaaagacttgtcgctatgggatggggatgcgtccgattaggcagcaggcggggcaacggcccacctggccttcgatcggtaggggttctgagaggaaggtcccccacactggtactgagacacggaccagactcctacgggaggcagcagtgaggaatattggtcaatgggcgcgagcctgaaccagccaagtagcgtgcgggacgacggccctatgggttgtaaaccgcttttgcacgggaataaagtgggggacgtgtccccttttgcatgtaccgtgagaataaggaccggctaatt

SEQ ID NO: 9080 - DNA, 490 bp, unidentified
  misc_feature 1..490: note = Ascusbbf_532402, encodes 16S rRNA
  source 1..490: mol_type = genomic DNA
agagtttgatcatggctcaggatgaacgctagctacaggcttaacacatgcaagtcgaggggcagcacaaggcagcaatgctgaggtggcgaccggcgcacgggtgcgtaacgcgtatccaaccttcccgttactcttggatagccttccgaaagggagattaatacaagatggtgttgaaattccgcatgttatttcaactaaagatttatcggtaacggatggggatgcgtgacattagatagatggcggggtaacggcccaccatgtccacgatgtctaggggttctgagaggaaggtcccccacactggaactgagacacggtccagactcctacgggaggcagcagtgaggaatattggtcaatggccggaaggctgaaccagccaagtagcgtgaaggatgaaggttctatggattgtaaacttcttttatacgggaataaaacctcccacgtgtgggagcttgtatgtaccgtatgaataagc

SEQ ID NO: 9081 - DNA, 490 bp, unidentified
  misc_feature 1..490: note = Ascusbbf_739701, encodes 16S rRNA
  source 1..490: mol_type = genomic DNA
agagtttgatcatggctcagattgaacgctggcggcaggcttaacacatgcaagtcgaacgatgattactagcttgctagtatgattagtggcgaacgggtgagtaatgcttaggaatctgcctagtagtgggggataacttaccgaaaggtaagctaataccgcatacgacctacgggtgaaagggggcgcaagctctcgctattagatgagcctaagttagattagctagttggtggggtaaaggcctaccaaggcgacgatctataactggtcttagcggatgatcagtcacaccggaactgagacacggtccggactcctacgggaggcagcagtggggaatattggacaatgggcgaaagcctgatccagccatgccgcgtgtgtgaagaaggccttttggttgtaaagcactttaagtggggaggaaaagcaactggttaatacccagtcgccctgacgttacccacagaataagcaccggcta

SEQ ID NO: 9082 - DNA, 490 bp, unidentified
  misc_feature 1..490: note = Ascusbbf_1191282, encodes 16S rRNA
  source 1..490: mol_type = genomic DNA
agagtttgatcctggccaggacgaacgctggcggcgggtttaacacatgcaagtcgagggtcgaagtttggtgcttgcaccgaacggaaaccggcgaacgggtgagtaacacgtgaggaaccaacccttcactttgggataacccaaggaaacttgggctaataccggatgccccggattgatcgcatgatctatccaggaaagctccggcggtgatggacggtctcgcggcctatcagctagttggtgaggtaacggctcaccaaggcgacgacgggtagctggagtgagagctcgaacagccacactgggactgagacacggcccagactcctacgggaggcagcagtggagaatcttgcacaatgggcgaaagcctgatgcagccgcgccgcgtgagggacgaaggtcttcggattgtaaacctctttcagtcgtgaagaagcgcaagtgacggtaacgacagaagaagccccggctaactacgtgc

SEQ ID NO: 9083 - DNA, 490 bp, unidentified
  misc_feature 1..490: note = Ascusbbf_1526457, encodes 16S rRNA
  source 1..490: mol_type = genomic DNA
agagtttgatcctggctcaggacgaacgctggcggcgtgcctaacacatgcaagtcgaacggaagtaagagcttcggtttttactttagtggcgaacgggtgagtaacgcgtgaagaacctgcctttcagtgggggacaacagttggaaacgactgctaataccgcataatgtatcgatggggcatcctgttgataccaaagatttattgctgaaagatggcttcgcgtctgattagctagatggcggggtaacggcccaccatggcgacgatcagtagccggtctgagaggatgaacggccacattgggactgagatacggcccagactcctacgggaggcagcagtggggaatattgggcaatgggggaaaccctgacccagcaacgccgcgtgaaggaagaaggccctcgggttgtaaacttcttttaccagggacgaagaacgtgacggtacctggagaaaaagccacggctaactacgtgccagc

SEQ ID NO: 9084 - DNA, 490 bp, unidentified
  misc_feature 1..490: note = Ascusbbf_1802349, encodes 16S rRNA
  source 1..490: mol_type = genomic DNA
agagtttgatcatggctcaggacgaacgctggcggcgtgcctaacacatgcaagtcgagcggagaacatgaagtgtttacacggattgttcttagcggcggacgggtgagtaacacgtgggtaacctgcctcaaagtgggggatagcctttcgaaaggaagattaataccgcataagcctgcagcaccgcatggtgcagcaggaaaaggagcaatccgctttgagatggacccgcggcgcattagctagttggtgaggtaacggctcaccaaggccacgatgcgtagccgacctgagagggtgatcggccacattggaactgagacacggtccagactcctacgggaggcagcagtggggaatattgcacaatgggcgaaagcctgatgcagcaacgccgcgtgagtgatgaaggccttcgggtcgtaaagctctttgatcagggatgataatgacagtacctgaaaaacaagccacggctaactacgtg

SEQ ID NO: 9085 - DNA, 207 bp, unidentified
  misc_feature 1..207: note = Ascusbbf_612830, encodes 16S rRNA
  source 1..207: mol_type = genomic DNA
agagtttgatcatggctcaggacgaacgctggcggcgtgcctaataatggacgcaagtctgatggagcaacgccgcgtgagtgaagaaggttttcggatcgtaaagctctgttgttggtgaagaaggatagaggtagtaactggcctttatttgacggtaatcaaccagaaagtcacggctaactacgtgccagcagccgcggtaat

SEQ ID NO: 9086 - DNA, 490 bp, unidentified
  misc_feature 1..490: note = Ascusbbf_519860, encodes 16S rRNA
  source 1..490: mol_type = genomic DNA
agagtttgatcctggctcagattgaacgctagcggaatgccttacacatgcaagtcgaacggcagcacggacttcggtctggtggcgagtggcgaacgggtgagtaatgtatcggaacgtacccagtagcgggggataactactcgaaagagtagctaataccgcatacgcccttcgggggagagcgggggatcttcggacctcgcactattggagcggctgatatcggattagctagttggtgaggtaaaggctcaccaaggcgacgatccgtagctggtttgagaggacgaccagccacactggaactgagacacggtccagactcctacgggaggcagcagtggggaattttggacaatgggggaaaccctgatccagccattccgcgtgtgtgaagaaggccttcgggttgtaaagcacttttggcgggaaagaaacggcgccgactaatactcggcgtaactgacggtacccgcagaataagcac

SEQ ID NO: 9087 - DNA, 471 bp, unidentified
  misc_feature 1..471: note = Ascusbbf_526575, encodes 16S rRNA
  source 1..471: mol_type = genomic DNA
agagtttgatcctggctcagagcgaacgctggcggaatgcttaacacatgcaagtcgcacgggcctttcggggtcagtggcggacgggtgagtaacgcgtacgaatgtgtcctgagatgggggacaacgccgggaaactggcgctaataccgcatatgtcctgaggggcaaagccgcgaggcgtcttaggagcagcctgcgtccgattagcttgttggtggggtaaaggcttaccaaggcgacgatcggtagctggtctgagaggatgatcagccacactggaactgagacacggtccagactcctacgggaggcagcagtggggaatattggacaatgggcggaagcctgatccagcaattccgcgtgggtgaagaaggtcttcggattgtaaagccctttcggcggggacgatgatgacggtacccgcagaagaagccccggctaacttcgtgccagcagcccggtaat

SEQ ID NO: 9088 - DNA, 490 bp, unidentified
  misc_feature 1..490: note = Ascusbbf_1899831, encodes 16S rRNA
  source 1..490: mol_type = genomic DNA
agagtttgatcatggctcagaatgaacgctggcggcatggattaggcatgcaagtcggacgggccgccctcgggcggccagtggcggaagggtgagtaacacgtgagcaacctgcccccgaggccggaacaagcgccggaaacggcgtctgacaccggatgaggcgcccccccgcatgggggggacgcgaaatattcatacctcggggatgggctcgcggcccattagcctgtcggcggggtagcggcccaccgaagctgcgacgggtaggtggtctgagaggacggtcacccacactgggactgagacactgcccagactcctgcgggaggctgcagtcgagaatcttccgcaatgggcgcaagcctgacggagcgatgccgcgtgggggacgaaggccctcgggtcgtaaacccctgtcgcccgggacgatcgtgacggtaccgggaaaggaagccacggctaaccacgtgccagcagccgcggtaat

SEQ ID NO: 9089 - DNA, 490 bp, unidentified
  misc_feature 1..490: note = Ascusbbf_471154, encodes 16S rRNA
  source 1..490: mol_type = genomic DNA
agagtttgatcctggctcaggacgaacgctggcggcgtgcctaatacatgcaagtcgagcggatcttttggagcttgctccttaaggttagcggcggacgggtgagtaacacgtgggcaacctgccctatagttggggataactccgggaaaccggagctaataccgaatgatacatttaagctcctgcttgaatgttgaaagatggtttcggctatcgctataggatgggcccgcggcgcattagctagttggtgaggtaacggctcaccaaggcgacgatgcgtagccgacctgagagggtgatcggccacactgggactgagacacggcccagactcctacgggaggcagcagtagggaatcttccacaatggacgaaagtctgatggagcaacgccgcgtgagtgaagaaggttttcggatcgtaaaactctgttgtaagggaagaacaagtgtagtagtaactggctgcaccttgacggtacctt

SEQ ID NO: 9090 - DNA, 490 bp, unidentified
  misc_feature 1..490: note = Ascusbbf_343113, encodes 16S rRNA
  source 1..490: mol_type = genomic DNA
agagtttgatcatggctcagattgaacgctggcggcaggcctaacacatgcaagtcgagcgcgaaagttcttcggaatgagtagagcggcggacgggtgagtaacacgtgggaatctacccagtagcgggggacaacagtcggaaacgactgctaataccgcatacgccctacgggggaaagcaggggatcttcggaccttgcactattggatgagcccacgtcggattagctagttggtagggtaaaggcctaccaaggctacgatccgtaactggtctgagaggatgatcagtcacactggaactgagacacggtccagactcctacgggaggcagcagtggggaatattgcacaatgggcgcaagcctgatgcagccatgccgcgtgtgtgaagaaggccttcgggttgtaaagcactttaagcggggaggaaggctatacggttaatacccgtgtagattgacgttacccgcagaataagcaccgg

SEQ ID NO: 9091 - DNA, 490 bp, unidentified
  misc_feature 1..490: note = Ascusbbf_1062590, encodes 16S rRNA
  source 1..490: mol_type = genomic DNA
agagtttgatcatggctcaggatgaacgctggcggcgtgcctaacacatgcaagtcgaacggagatcatatggagattggcttcggccaaaggaagcatgatcttagtggcggacgggtgagtaacgcgtggggaacctgccccataccgggggataacagccagaaatggctgctaataccgcataagcgcccggggtcgcatgaccctgagtgaagaactccggtggtatgggatggacccgcgttggattagccagttggcggggtaacggcccaccaaagcgacgatccatagccggcctgagagggtggacggccacattgggactgagacacggcccagactcctacgggaggcagcagtggggaatattgcacaatggggggaaccctgatgcagcgacgccgcatgaaggaagaagtatctcggtatgtaaacttctatcagcagggaagaagatgacggtacctgcacaagaagccccggc

SEQ ID NO: 9092 - DNA, 184 bp, unidentified
  misc_feature 1..184: note = Ascusbbf_337571, encodes 16S rRNA
  source 1..184: mol_type = genomic DNA
agagtttgatcctggctcagccactacgttgatgcggtgtctcacctgccatgagcgccgttgcgttattgatataacctgaaaataagccttgtaagaagcgcatacagataatgaaaagcgcactttgagctaagccggtaataaagatggttaaactcataacgccagcagccgcggtaat

SEQ ID NO: 9093 - DNA, 490 bp, unidentified
  misc_feature 1..490: note = Ascusbbf_1797963, encodes 16S rRNA
  source 1..490: mol_type = genomic DNA
agagtttgatcctggctcaggacgaacgctggcggcgtgcctaacacatgcaagtcgaacggagatattttggaatgagatttcggttgaatgaagggatatcttagtggcggacgggtgagtaacgcgtgagtaacctgcccataagagggggataacgttctgaaaaggacgctaataccgcataaaatatttagatcgcatgatttagatatcaaaggagaaatccgcttatggatggactcgcgtccgattagctggttggcgggataacagcccaccaaggcgacgatcggtagccggactgagaggttgaacggccacattgggactgagacacggcccagactcctacgggaggcagcagtgggggatattgcgcaatgggggaaaccctgacgcagcaacgccgcgtgaatgaggaaggtcttcggattgtaaaattcttttgttgaggacgaaggaagtgacggtactcaacgaataagct

SEQ ID NO: 9094 - DNA, 470 bp, unidentified
  misc_feature 1..470: note = Ascusbbf_854865, encodes 16S rRNA
  source 1..470: mol_type = genomic DNA
agagtttgatcctggctcagaacgaacgctggcggcaggcctaatacatgcaagtcgaacgcactcttcggagtgagtggcagacgggtgagtaacgcgtgggaattttccttgcagtacggaataactccgggaaaccggtgctaataccgtatacgccctttgggggaaagatttatcgctgcaagataagcccgcgtcggattagctagttggtggggtaatggcctaccaaggcttcgatccgtagctggtctgagaggatgatcagccacactgggactgagacacggcccagactcctacgggaggcagcagtagggaatattggacaatgggcgaaagcctgatacagccatgccgcgtgagtgaagaaggccttagggttgtaaagctcttttggcggggacgataatgacggtacccgcagaataagctccggctaacttcgtgccagcagccgcggtaat

SEQ ID NO: 9095 - DNA, 490 bp, unidentified
  misc_feature 1..490: note = Ascusbbf_568869, encodes 16S rRNA
  source 1..490: mol_type = genomic DNA
agagtttgatcctggctcaggacgaacgctggcggcgtgcctaacacatgcaagtcgaacgagaatttcgtaacggaagtcttcggacagaagttatgaaaggacagtggcggacgggcgagtaacgcgtgagtaacctgcccataagagcgggatagcccatggaaacgtggagtaataccgcatgaggtatagtattcgcatggatacagtattaaagatttatcgcttatggatggactcgcgtcagattagctggttggagaggtaacggctcaccaaggcgacgatctgtagccgaactgagaggttgaacggccgcattgggactgagacacggcccagactcctacgggaggcagcagtgggggatattgcgcaatgggggaaaccctgacgcagcaacgccgcgtgcaggaagaaggtcttcggattgtaaactgttgtcgcaagggaagaagacagtgacggtaccttgtgagaaagtcac

SEQ ID NO: 9096 - DNA, 490 bp, unidentified
  misc_feature 1..490: note = Ascusbbf_1332564, encodes 16S rRNA
  source 1..490: mol_type = genomic DNA
agagtttgatcctggctcagattgaacgctggcggcatgcttaacacatgcaagtcgaacgagggaagcagcttgctgtggacctagtggcggacgggtgagtaacgtataggaatctaccttggggtgggggataacgtatggaaacgtacgctaataccacataacacttacgagtcaaagcgggggatcttcggacctcgcgcccttggatgagcctatattggattagctagttggtagggtaaaggcctaccaaggcgacgatccatagctggtttgagaggatgatcagccacatcgggactgagacacggcccgaactcctacgggaggcagcagtggggaatattggacaatgggggcaaccctgatccagcaatgccgcgtgtgtgaagaaggccttagggttgtaaagcactttcgttagtgaagaaaggtttatggctaatacctatgaatttgacattagctaaagaagaagcaccgg

SEQ ID NO: 9097 - DNA, 152 bp, unidentified
  misc_feature 1..152: note = Ascusbbf_574568, encodes 16S rRNA
  source 1..152: mol_type = genomic DNA
agagtttgatcctggctcagcatcgtcccgggtttaatctcgtcctcctcatcttgccagcagccgcggtaatagctagagtttgatcctggctcaggccagcagccgcggtaatagagtttgatcatggctcagccagcagccgcggtaat

SEQ ID NO: 9098 - DNA, 483 bp, unidentified
  misc_feature 1..483: note = Ascusbbf_911551, encodes 16S rRNA
  source 1..483: mol_type = genomic DNA
agagtttgatcctggctcagggtgaacgctggcggtatgcctaagacatgcaagtcgaacgggctgtttatgcagccagtggcggacgggtgagtaacacgtaggtgacctaccccaaagtctgggacaactaggagaaatcttagctaatcctggatgtggacatctactttggtggatgtttaaagcttcggcgctttgggatgggcctgcggcgcatcaggtagttggtggggtaatggcctaccaagccgacgacgcgtagctggtctgagaggacgatcagccacaggggtactgagacacggaccccactcctacgggaggcagcagttaggaatcttccgcaatgggcgaaagcctgacggagcgataccgcttgaaggacgaagcccttcggggtgtaaacttctgaactcgggacgataatgacggtaccggggtaatagcaccggctaactccgtgccagcagccgcggtaat

SEQ ID NO: 9099 - DNA, 490 bp, unidentified
  misc_feature 1..490: note = Ascusbbf_1534675, encodes 16S rRNA
  source 1..490: mol_type = genomic DNA
agagtttgatcctggctcaggatgaacgctagcggcaggcttaacacatgcaagtcgaggggcagcacgtcttcggatggtggcgaccggcgcacgggtgcgcaacgcgtatacaatctaccttttactggggcatagcccggggaaacccggattaatatcccatggtaccatgatatagcattatattatggttaaagctttggcggtgaaagatgagtatgcgttctattagctagatggtaaggtaacggcttaccatggctttgatagataggggtcctgagagggagatcccccacactggtactgagacacggaccagactcctacgggaggcagcagtgaggaatattggacaatgggcgagagcctgatccagccatgccgcgtgcaggaagacggccctatgggttgtaaactgcttttatacgggaagaaacaccccttcgtgaaggggcttgacggtaccgtatgaataaggatcggc

SEQ ID NO: 9100 - DNA, 261 bp, unidentified
  misc_feature 1..261: note = Ascusbbf_557827, encodes 16S rRNA
  source 1..261: mol_type = genomic DNA
agagtttgatcctggctcaggatgaacgctagctacaggcttaacacatgcaagtcgaggggcagcattaaaggggaggcagcagtggggaatattgcacaatgggggaaaccctgatgcagccatgccgcgtgtgtgaagaaggccttcgggttgtaaagcacttttgcattcgaggaagacggcgtataaataaatgcgctatttgacgttagagtgtgaataagcaccggcaaactccgtgccagcagccgcggtaat

SEQ ID NO: 9101 - DNA, 490 bp, unidentified
  misc_feature 1..490: note = Ascusbbf_1073574, encodes 16S rRNA
  source 1..490: mol_type = genomic DNA
agagtttgatcatggctcaggatgaacgctggcggcgtgcttaacacatgcaagtcgaacgctgaagctcccagcttgctgggggtggatgagtggcgaacgggtgagtatcacgtgagtaacctgccctgaactctgggataagcctgggaaactgggtctaatactggataggaccaatcatcgcctggtggttggtggaaagcctttgtgcggtttgggatggactcgcggcctatcagcttgttggtgaggtaatggcttaccaaggctttgacgggtagccggcctgagagggtgaccggccacactgggactgagacacggcccagactcctacgggaggcagcagtgggggatattgcacaatgggggaaaccctgatgcagcgacgccgcgtgagggatgacggccttcgggttgtaaacctctttcagttgggacgaagcccctttgggggtgacggtaccttcagaagaagcaccggcta

SEQ ID NO: 9102 - DNA, 490 bp, unidentified
  misc_feature 1..490: note = Ascusbbf_1862553, encodes 16S rRNA
  source 1..490: mol_type = genomic DNA
agagtttgatcatggctcaggatgaacgctagcggcaggcctaacacatgcaagtcgaggggtagagttagcttgctaacttgagaccggcgcacgggtgcgtaacgcgtatgcaatctaccttgtagagggggatagcccagagaaatttggattaataccccatagtataatagagtggcatcattttattattaaagttccaacgctacaagatgagcatgcgtcccattagttagttggtgtggtaacggcgcaccaagacgatgatgggtaggggtcctgagagggagatcccccacactggtactgagacacggaccagactcctacgggaggcagcagtgaggaatattggtcaatggacgcaagtctgaaccagccatgccgcgtgcaggaagaaggctctatgggttgtaaactgcttttgtacgggaagaaattatccctcgtgagggagcttgacggtaccgtaagaataaggatcggc

SEQ ID NO: 9103 - DNA, 474 bp, unidentified
  misc_feature 1..474: note = Ascusbbf_1793580, encodes 16S rRNA
  source 1..474: mol_type = genomic DNA
agagtttgatcctggctcaggatgaacgctggcggcgtgcttaatacatgcaagtcgagcggtaacacttcgggtgacgagcggcggacggctgagtaacgcgtaggaatgtaccccaaactgagggataactgcctgaaaaggtagctaataccgcatgtgatcttcggattaaagcttcggcggtttgggaacagcctgcgtatgattagctagttggtgaggtaatggctcaccaaggcaatgatcattagctggtctgagaggatgatcagccagactgggactgagacacggcccagactcctacgggaggcagcagtagggaattttccacaatggacgaaagtctgatggagcaacgccgcgtgcaggatgaaacccttcggggcgtaaactgcttttatatgtgaagattatgacggtagcatatgaataaggatcggctaactccgtgccagcagccgcggtaat

SEQ ID NO: 9104 - DNA, 472 bp, unidentified
  misc_feature 1..472: note = Ascusbbf_1769561, encodes 16S rRNA
  source 1..472: mol_type = genomic DNA
agagtttgatcatggctcagagcgaacgctggcggcaggcttaacacatgcaagtcgagcggtcgtagcaatacggcagcggcagacgggagagtaacacgtgggaacgtgcccatcagttcggaacaacccagggaaacttgggctaataccggatacgcccttacggggaaagatttatcgctgatggagcggcccgcgtctgattagctagttggtgaggtaatggctcaccaaggcgacgatcagtagctggtctgagaggatgatcagcctcactgggactgagacacggcccagactcctacgggaggcagcagtgggggatattggacaatgggcgcaagcctgatccagccatgccgcgtggatgatgaaggccttagggttgtaaaatcctttcggcggggaagataatgacggtacccgcagaagaagccccggctaacttcgtgccagcagccgcggtaat

SEQ ID NO: 9105 - DNA, 490 bp, unidentified
  misc_feature 1..490: note = Ascusbbf_1886139, encodes 16S rRNA
  source 1..490: mol_type = genomic DNA
agagtttgatcctagctcagattgaacgctggcggcaggcttaacacatgcaagtcgagcggatgaagggagcttgctcctggattcagcggcggacgggtgagtaatgcttaggaatctgcctattagtgggggacaacagttggaaacgactgctaataccgcatacgccctacgggggaaaggaggggatcttcggacctttcgctaatagatgagcctaagtcagattagctagttggtggggtaaaggcctaccaaggcgacgatctgtagcgggtctgagaggatgatccgccacactgggactgagacacggcccagactcctacgggaggcagccgtggggaatattggacaatgggggcaaccctgatccagccatgccgcgtgtgtgaagaaggccttttggttgtaaagcactttaagcgaggaggaggagctctagattaatactctagatgcttggacgttactcgcagaataagca

SEQ ID NO: 9106 - DNA, 490 bp, unidentified
  misc_feature 1..490: note = Ascusbbf_1713285, encodes 16S rRNA
  source 1..490: mol_type = genomic DNA
agagtttgatcatggctcaagacgaacgctggcggcgcgcctaacacatgcaagtcgagcggggtaaggtttcggccttacttagcggcggacgggtgagtaacgcgtgagtaacctgcccttcagcgggggatagcgtcgggaaactgacggtaataccgcataatgtatagcgaaggcatcttagctataccaaaggagagattcactgaaggatggactcgcgtccaattaggtagttggtgaggcaatggctcaccaagccgacgattggtagccggactgagaggtcaatcggccacattgggactgagatacggcccaggctcctacgggaggcagcagtgggggatattgcacaatggaggaaactctgatgcagcgacgccgcgtgagggaagacggtcttcggattgtaaacctctgtcatacgggacgaaaaaaatgacggtaccgtatgaggaagccacggctaactacgtgccagcag

SEQ ID NO: 9107 - DNA, 480 bp, unidentified
  misc_feature 1..480: note = Ascusbbf_827778, encodes 16S rRNA
  source 1..480: mol_type = genomic DNA
agagtttgatcatggctcagaacgaacgctggcggcatgcctaacacatgcaagtcgaacggtggcttcggccacagtggcgcacgggtgagtaacacgtgggaacctgcctttcggttcgggataacgtctggaaacggacgctaacaccggatacgcccttcctggagacaggttggggaaagttcacgccgagagaggggcccgcgtccgattaggtagttggtgaggtaacggctcaccaagccgacgatcggtagctggtctgagaggatgatcagccacactgggactgagacacggcccagactcctacgggaggcagcagtggggaatattggacaatgggcgcaagcctgatccagcaatgccgcgtgagtgatgaaggccttagggttgtaaagctctttcgcacgcgacgatgatgacggtagcgtgagaagaagccccggctaacttcgtgccagcagccgcggtaat

SEQ ID NO: 9108 - DNA, 490 bp, unidentified
  misc_feature 1..490: note = Ascusbbf_1565529, encodes 16S rRNA
  source 1..490: mol_type = genomic DNA
agagtttgatcctggctcaggacgaacgctggcggcgtgcttcatacatgcaagtcgaacgagaatctttagcttgctaaagaggaaagtggcggacgggtgagtaacacgtaggaaatctgcctcaaggagggggacaacatttggaaacggatgctaaaaccccgtatgaggttacctggaatggtaatcttgaaaactccggtgccttgagatgagcctgcgtccgattagcttgttggcggggtaaatgcccaccaaggcgacgatcggtagctggtttgagaagatgatcagccacaatgggactgagacacggcccatactcctacgggaggcagcagtagggaattttgcgcaatgggcgaaagcctgacgcagcaacgccgcgtgaatgaagaagcccttcggggtgtaaagttctgtcaccggggacgaaaaaatgacggtacccggagaggaagcaccggctaactccgtgccagcagcc

SEQ ID NO: 9109 - DNA, 490 bp, unidentified
  misc_feature 1..490: note = Ascusbbf_1779372, encodes 16S rRNA
  source 1..490: mol_type = genomic DNA
agagtttgatcctggctcagattgaacgctggcggcaggcctaacacatgcaagtcgagcggcagcggggagtagcttgctactctgccggcgagcggcggacgggtgagtaatgcttgggaacttgcctttaggagggggataaccacgggaaactgtggctaataccgcataatgtctacggaccaaagcaggggatcttcggaccttgcacctagagataggcccaagtgagattagctagttggtggggtaaaggctcaccaaggcgacgatctctagctgttctgagaggatgatcagccacactgggactgagacacggcccagactcctacgggaggcagcagtggggaatattgcacaatgggggaaaccctgatgcagccatgccgcgtgtgtgaagaaggccttcgggttgtaaagcactttcagtggtgaggaaggctataagattaatactcttatagattgacgttagccacagaag

SEQ ID NO: 9110 - DNA, 470 bp, unidentified
  misc_feature 1..470: note = Ascusbbf_1012408, encodes 16S rRNA
  source 1..470: mol_type = genomic DNA
agagtttgatcctggctcagaacgaacgctggcggcaggcttaacacatgcaagtcgaacgaactcttcggagttagtggcagacgggtgagtaacaggtgggaacctaccctgttcttcggaataacacatggaaacgtgtgctaataccggatacgcccttatggggaaagatttatcggaataggatgggcccgcgtaagattagctagatggtgaagtaatggctcaccatggcgacgatctttagctggtctgagaggatgatcagccacactgggactgagacacggcccagactcctacgggaggcagcagtggggaatattggacaatgggggcaaccctgatccagccatgccgcgtgagtgatgaaggccttagggttgtaaagctctttcagtggtgaagataatgacggtaaccacagaagaagccccggctaacttcgtgccagcagccgcggtaat

SEQ ID NO: 9111 - DNA, 490 bp, unidentified
  misc_feature 1..490: note = Ascusbbf_1427294, encodes 16S rRNA
  source 1..490: mol_type = genomic DNA
agagtttgatcatggctcaggatgaacgctagctacaggcttaacacatgcaagtcgaggggcagcatggtttgtgcttgcacagaccgatggcgaccggcgcacgggtgagtaacacgtatccaacctgccttgtacccggggatagccctctgaaaggaggattaatacccgatgtgctgcggtggcggcatcgcctttgcagtaaagattcatcggtacacagatggggatgcgtctgattagcttgtcggcggggtaacggcccaccgaggctacgatcagtaggggttctgagaggaaggtcccccacataggaactgagacacggtcctaactcctacgggaggcagcagtgaggaatattggtcaatggtcgaaggactgaaccagccaagtagcgtgaaggatgactgccctacgggttgtaaacttcttttatgcgggaataaagtgtgccacgtgtggcattttgcatgtaccgcatgaa

SEQ ID NO: 9112 - DNA, 490 bp, unidentified
  misc_feature 1..490: note = Ascusbbf_1086672, encodes 16S rRNA
  source 1..490: mol_type = genomic DNA
agagtttgatcctgggctcaggacgaacgctggcggcgtgcttaacacatgcaagtcgagcggtaaggccctttcgggggtacacgagcggcgaacgggtgagtaacacgtgagtaatctgcccttcactttgggataaccctcggaaacgggggctaataccggatattcattgctccgcgcatgtggggtggtggaaagatttggttcggtggaggatgggctcgcggcctatcagctggttggtggggtgatggcctaccaaggcgacgacgggtagccggcctgagagggtgaccggccacactgggactgagacacggcccagactcctacgggaggcagcagtggggaatattggtcaatgggcgagagcctgaaccagccaagtagcgtgcgggacgaaggccctatgggttgtaaaccgcttttacggggggataaagtgagtgacgtgtcattcattgcaggtaccccgcgaataaggacc

SEQ ID NO: 9113 - DNA, 164 bp, unidentified
  misc_feature 1..164: note = Ascusbbf_1861856, encodes 16S rRNA
  source 1..164: mol_type = genomic DNA
agagtttgatcctggctcaggatgaacgctagcggcaggcttaacacatgcaagtcgaggggcatcgcggggcgggacgaatggcgtagcggtcaatacccgttacgagtgacggtaccgtaagagaaagccacggctaactacgtgccagcagccgcggtaat

SEQ ID NO: 9114 - DNA, 171 bp, unidentified
  misc_feature 1..171: note = Ascusbbf_1653821, encodes 16S rRNA
  source 1..171: mol_type = genomic DNA
agagtttgatcatggctcagagtttgatcatggctcagagagtttgatcatggctcagagagtttgatcatggctcagccagcagccgcggtaatactcttccgatctagagtttgatcatggctcagccagcagccgcggtaataccagcaggccagcagccgcggtaat

SEQ ID NO: 9115 - DNA, 490 bp, unidentified
  misc_feature 1..490: note = Ascusbbf_674367, encodes 16S rRNA
  source 1..490: mol_type = genomic DNA
agagtttgatcctggctcaggatgaacgctggcggcgtgcttaacacatgcaagtcgaacggaccggatttatctggtccgtggcagacgggtgcgtaacacgtaggtgacctgcccttgagtggggaataacgcgactaacgtcgcgctaataccgcatacgttggctccttcgctggggtcagtaaagcagcaatgcgcttggggatgggcctgcggcggattaggtagttggtggggtaagggcctaccaagccgatgatccgtagggggcgtgagagcgtggccccccacattggcactgagacacgggccaaactcctacgggaggcagcagtgaggaatattgcacaatgggcgcaagcctgatgcagcaacgccgcgtggaggacgacggccttcgggttgtaaactccttttctgggggacgagcaaggacggtacctcaggaataagtctcggctaactacgtgccagcagccgcggtaat

SEQ ID NO: 9116 - DNA, 490 bp, unidentified
  misc_feature 1..490: note = Ascusbbf_817819, encodes 16S rRNA
  source 1..490: mol_type = genomic DNA
agagtttgatcatggctcagagcgaacgtttgcggcgggcttaacacatgcaagtcgtacgctgaacccttcggggggatgagtggcgcacgggtgcgtaacacgtgggtaaccaaccctgtagactgggacaaccgagggaaacttcggctaataccggatgtgctacatggggcttcggctctgtgtaggaaaggagcaatccgctacaggacgggcccgcggcccatcagctagttggtgaggtaacggctcaccaaggcaaagacgggtagctggtctgagaggatgatcagtcacactggaactgagacacggtccagactcctacgggaggcagcagtggggaatattgcgcaatgggcgaaagcctgacgcagccacgccgcgtgagcgatgaaggtcctaggatcgtaaagctctgtggggggagaagaaacctgacggtatccccttagcaagcaccggctaactccgtgccagcagccgc

SEQ ID NO: 9117 - DNA, 490 bp, unidentified
  misc_feature 1..490: note = Ascusbbf_1059042, encodes 16S rRNA
  source 1..490: mol_type = genomic DNA
agagtttgatcatggctcaggacgaacgctggcggcgcgcttaacacatgcaagtcgaacggtgaacagcggaaagtttgcttttagctgtacatagtggcggacgggtgaataacgcgtgaggacttgccctgtacagggaaacaactgatggaaacgtcagctaataccccataagccatgagataaaaggagcgatccgatacaggagagactcgcgttctatcagttagttggtgaggtaacaactcaccaaggcgaagacggatagccggactgaaagattggccggccacattggaactgagatacgatccagactcctgcggaaagcagcagtagggaatattaggcaatgggggaaaccctgacccagcgacgccgcgtgagtgaagaaatccctcgaaatgtaaagctctattgtgcgggaagaaggaaataacgataccgcacgaggaagccacggcaaactacgtgccagcagccgcgg

SEQ ID NO: 9118 - DNA, 490 bp, unidentified
  misc_feature 1..490: note = Ascusbbf_1771696, encodes 16S rRNA
  source 1..490: mol_type = genomic DNA
agagtttgatcatggctcaggatgaacgctggcggcgtgcttaacacatgcaagtcgagcgagagaacttgaaggaaaacttcggttagaattcgaatgatctagcggcggacgggtgagtaacgcgtgggaaacctgccttatacaaggggatagcctcgggaaaccgggattaataccctataaagccataggaacgcatgttctaatggtcaaagcgttagcggtataagatggtcccgcgtcccattagctagttggagaggtaaaggctcaccaaggcgacgatgggtagccggcctgagagggtgaacggccacactggaactgagacacggtccagactcctacgggaggcagcagtggggaatattgcacaatgggggaaaccctgatgcagcgacgccgcgtgagcgatgaaggctttcgggtcgtaaagctctgtcctaagggaagataatgacggtaccttaggaggaagccccggcta

SEQ ID NO: 9119 - DNA, 356 bp, unidentified
  misc_feature 1..356: note = Ascusbbf_595118, encodes 16S rRNA
  source 1..356: mol_type = genomic DNA
agagtttgatcctggctcaggatgaacgctggcggcgtgcctaacacatgcaagtcgaacggaaagaattcttcggaattctttcggtggcggacgggtgagtaacgcgtgggtaacctgccccatacaggggaacaacagctggaaacggctgctaataccgcataagcgcacagtactgcatggtacagtgtgaaaagattttatcggtatgggatggggatgcgtctgattagccagttggcggggtaacggcccaccaaggcgacgatcagtaggggttctgagaggaaggtcccccacattggaactgagacacggtccaaactcctacgggagccagcagccgcggtaat

SEQ ID NO: 9120 - DNA, 490 bp, unidentified
  misc_feature 1..490: note = Ascusbbf_866423, encodes 16S rRNA
  source 1..490: mol_type = genomic DNA
agagtttgatcatggctcaggacgaacgctggcggcgcgcctaacacatgcaagtcgaacgggggtattgagacggaagcttcggcagaagactcaatactttagtggcgaacgggtgagtaacacgtgaggaacctgcctttaagagggggataacacttagaaataggtgctaataccgcataagaccacgcagcggcatcgctgaggggtcaaaggaggaatccgcttaaagatggcctcgcgtccgattaggtagtaggcggggcaacggcccacctagccgacgatcggtagccggactgagaggttgaacggccacattgggactgagacacggcccagactcctacgggaggcagcagtggggaatattgggcaatgggggaaaccctgacccagcgacgccgcgtgagggaagaaggttttcggattgtaaacctctgtcttcagggaagaagaaagtgacggtaccttgtgagaaagtcac

SEQ ID NO: 9121 - DNA, 490 bp, unidentified
  misc_feature 1..490: note = Ascusbbf_690522, encodes 16S rRNA
  source 1..490: mol_type = genomic DNA
agagtttgatcatggctcagattgaacgctggcggtatgcttaacacatgcaagtcgaacggcagcatggtctagcttgctagactgatggcgagtggcgaacgggtgagtaacgcgtaggaatataccttaaagagggggacaacttggggaaactcaagctaataccgcataatttcttaggaaaaaagctggggaccttcgggcctggcgctttaagattagcctgcgtacgattagctagttggtagggtaaaggcctaccaaggcgacgatcgttagctggtctgagaggatgaccagccacactggaactgagacacggtccagactcctacgggaggcagcagtggggaatattggacaatgggggcaaccctgatccagcaataccgcgtgtgtgaagaaggcctgagggttgtaaagcactttcagtggggaggaggatacttaggttaagagccagagtattggacgttacccacagaag

SEQ ID NO: 9122 - DNA, 490 bp, unidentified
  misc_feature 1..490: note = Ascusbbf_1024361, encodes 16S rRNA
  source 1..490: mol_type = genomic DNA
agagtttgatcatggctcaggacgaacgctggcggcgtgcttaacacatgcaagtcgaacggtaaggccccttcgggggtacacgagtggcgaacgggtgagtaacacgtgagtaacctgccccagactctggaataagcattcgaaaggatgtctaatgccggatgttcacctagcttcacatgaagtctggtggaaagatttattggtctgggatggactcgcggcctatcagcttgttggtgaggtaatggctcaccaaggcttcgacgggtagccggcctgagagggcgaccggccacactgggactgagatacggcccagactcctacgggaggcagcagtgggaatattgcacaatggacgaaagtctgatgcagcaacgccgcgtgcgggatgaaggccttcgggttgtaaaccgctttcacccatgacgaagctaacgtgacggtaatgggagaagaagcaccggccaactacgtgccagca

SEQ ID NO: 9123 - DNA, 490 bp, unidentified
  misc_feature 1..490: note = Ascusbbf_1756071, encodes 16S rRNA
  source 1..490: mol_type = genomic DNA
agagtttgatcctggctcagagcgaacgctggcggcaggcttaacacatgcaagtcgaacgggcgtagcaatacgtcagtggcagacgggtgagtaacgcgtgggaacgtaccttttggttcggaacaacacagggaaacttgtgctaataccggataagcccttacggggaaagatttatcgccgaaagatcggcccgcgtctgattagctagttggtgaggtaaaagctcaccaaggcgacgatcagtagctggtctgagaggatgaacggccacattggaactgagacacggtccagactcctacgggaggcagcagtggggaatcttccgcaatgggcgaaagcctgacggagcaacgccgcgtgagtgaagaaggccttcgggtcgtaaagctctgttgtcggggacgaatgtacgaactatcaacaacggttcgtaatgacggtacctgacgaggaagccacggctaactacgtgccagcagcc

SEQ ID NO: 9124 - DNA, 490 bp, unidentified
  misc_feature 1..490: note = Ascusbbf_650941, encodes 16S rRNA
  source 1..490: mol_type = genomic DNA
agagtttgatcatggctcaggatgaacgctggcggcacgcttaacacatgcaagtcgaacggagagcttttggtttactgagagctcttagtggcggacgggtgagtaacacgtgagcaacctgcctttgagagagggatagcttctggaaacggatggtaatacctcatgacataacagtaccgcatgatattgttatcaaagatttatcactcaaagatgggctcgcgtctgattagatagttggtggggtaatggcctaccaagtcgacgatcagtagccggactgagaggttgaacggccacattgggactgagatacggcccagactcctacgggaggcagcagtcgggaatattgcgcaatggaggaaactctgacgcagtgacgccgcgtgcaggaagaaggttttcggactgtaaactgctttagacagggaagaataaagacagtacctgtagaataagctccggctaactacgtgccagc

SEQ ID NO: 9125 - DNA, 490 bp, unidentified
  misc_feature 1..490: note = Ascusbbf_1262105, encodes 16S rRNA
  source 1..490: mol_type = genomic DNA
agagtttgatcctggctcaggacgaacgctggcggcatgcctaacacatgcaagtcgaacggactttttagtggaaaatccttcgggatcggaaattaaaaagttagtggcggacgggtgagtaacgcgtggataacctgcccataggttggagacaactccgggaaaccggagctaataccgaataaaatctattgaacacatgtttagtaaatcaaaggaggcctctcgaagaagcttctgccaatggatggatccgcgtctgattagctagttggtgaggtaacggcccaccaaggcgacgatcagtagccgacctgagagggtgaccggccacattgggactgagacacggcccaaactcctacgggaggcagcagtggggaatattgcacaatgggcgaaagcctgatgcagcgacgccgcgtgagcgaagaagtatttcggtatgtaaagctctatcagcagggaagataatgacggtacctga

SEQ ID NO: 9126 - DNA, 490 bp, unidentified
  misc_feature 1..490: note = Ascusbbf_339826, encodes 16S rRNA
  source 1..490: mol_type = genomic DNA
agagtttgatcatggctcagagtgaacgctggcggcgtgcttaacacatgcaagtcgaacgagaacgggttataacttgttataactgtcagctaagtggcgcacgggtgagtaatgtataggtaatatgccttctactaagggataacaattggaaacgattgctaataccttatattccttttaatcaaaagattgaaagggaaagatttatcggtagaagattggcctgtattgtatcagttagttggtggggtaatggcctaccaagacaatgacacataactggtttgagaggatgatcagtcacactggaactgagacacggtccagactcctacgggaggcagcagtggggaatattgcacagtggaggaaactctgatgcagccatgccgcgtgtgtgaagaaggccttcgggttgtaaagcactttcggaggggaggaacaaatgacgttaccctcagaagaagcaccggctaactccgtg

SEQ ID NO: 9127 - DNA, 470 bp, unidentified
  misc_feature 1..470: note = Ascusbbf_1138571, encodes 16S rRNA
  source 1..470: mol_type = genomic DNA
agagtttgatcatggctcagaacgaacgctggtggcgtgtcttatacatgcaagtcgaacgattccttcggggatagtggcagacgggtgagtaacacgtgggaatctacctggttcttcgggataacagttggaaacggctgctaataccggatacgcccttttggggaaagatttatcggaatcagatgagcccgcgtaagattagctagatggtggggtaacggcctaccatggcgacgatctttagctggtctgagaggatgatcagccacactgggactgagacacggcccagactcctacgggaggcagcagtggggaatattggacaatgggcgcaagcctgatccagccatgccgcgtgagtgatgaaggccttagggttgtaaagctctttcaccggtgaagataatgactgtagccggagaagaagccccggctaacttcgtgccagcagccgcggtaat

SEQ ID NO: 9128 - DNA, 392 bp, unidentified
  misc_feature 1..392: note = Ascusbbf_1527954, encodes 16S rRNA
  source 1..392: mol_type = genomic DNA
agagtttgatcctggctcaggatgaacgctagctacaggcttaacacatgcaagtcgaggggcatcatggagtttgcttgcaaactctgatggcgaccggcgcacgggtgagttcgcgtccgattagatagttggtgaggtaacggcccaccaagtcgacgatcggtagccgacctgagagggtgatcggccacattggaactgagagacggtccaaactcctacgggaggcagcggtggggaatattgggcaatgggcgaaagcctgacccagcaacgccgcgtgagcgaagaaggctttcgggttgtaaagctctgttataggggacgaaggaagtgacggtaccctataaggaagccccggctaactacgtgccagcagccgcggtaat

SEQ ID NO: 9129 - DNA, 490 bp, unidentified
  misc_feature 1..490: note = Ascusbbf_1711503, encodes 16S rRNA
  source 1..490: mol_type = genomic DNA
agagtttgatcctggctcaggacgaacgctggcggcgcgtcttaagcatgcaagtcgagcgggattgagtagcttgctactcatgagagcggcggactggtgagtaacgcgtgggtgacgtaccctgaggatggggatagctcctagaaataggaggtaataccgaatacggtgtgcagggttagagactgtacatcaaaggttcttttgaaccgccacaggagcggcccgcgtactattagttagttggcggggtaacggcccaccaagacgacgatagctacccggcctaagagggtgaacgggcacattgggactgagacacggcccaaactcctacgggaggcagcagtgggggatattgcacaatggaggaaactctgatgcagcgacgccgcgtgagtgaagaagtatttcggtatgtaaagctctatcagcagggaagaaagactcgaaagagagatgacggtacctgagtaagaagccccgg

SEQ ID NO: 9130 - DNA, 490 bp, unidentified
  misc_feature 1..490: note = Ascusbbf_1527535, encodes 16S rRNA
  source 1..490: mol_type = genomic DNA
agagtttgatcctggctcaggatgaacgctggcggcatgcttaacacatgcaggtcgaacgggaagtggtgtttccagtggcgaacgggtgagtaacgcgtaagaacctgcccttgggaggggaacaacaactggaaacggttgctaataccccgtaggctgaggagcaaaaggagaaatccgcccaaggaggggctcgcgtctgattagctagttggtgaggcaatagcttaccaaggcgatgatcagtagctggtccgagaggatgatcagccacactgggactgagacacggcccagactcctacgggaggcagcagtggggaattttggtcaatgggcgggagcctgaaccagccaagtcgcgtgagggaggaaagtcctacggattgtaaacctctttagccggggagcaacgtgcgccacgtgtggcgcagtgagagtacccggagaataagcatcggctaactccgtgccagcagccgcggta

SEQ ID NO: 9131 - DNA, 490 bp, unidentified
  misc_feature 1..490: note = Ascusbbf_512475, encodes 16S rRNA
  source 1..490: mol_type = genomic DNA
agagtttgatcatggctcaggacgaacgctggcggcgtgcctaatacatgcaagtcgagcgagggtctttacgaccctagcggcggacgggtgagtaacacgtaggcaacctgcctctcagaccgggataacatagggaaacttatgctaataccggataggtttttggatcgcatgatccgaaaagaaaagatggcttcggctatcactgggagatgggcctgcggcgcattagctagttggtggggtaacggcctaccaaggcgacgatgcgtagccgacctgagagggtgaccggccacactggtactgagacacggaccaaactcctacgggaggcagcagtgaggaatattggtcaatgggcgagagcctgaaccagccaaatagcgtgcaggatgactgccctatgggttgtaaactgcttttatacggggataaagtgaggtatgcatacctttttgtaggtaccgtatgaataaggaccggc

SEQ ID NO: 9132 - DNA, 490 bp, unidentified
  misc_feature 1..490: note = Ascusbbf_1668137, encodes 16S rRNA
  source 1..490: mol_type = genomic DNA
agagtttgatcatggctcaggatgaacgctagctacaggcttaacacatgcaagtcgaggggcatcaggatctgtgcttgcacagattgctggcgaccggcgcacgggtgagtaacgcgtatccaaccttccgcatagtagggaatagcccggcgaaagtcggattaatgccctatgttttccgatgaggacatctgagctggaacaaagatttatcgctatgcgatggggatgcgtctgattaggttgttggcggggtaacggcccaccaagccgacgatcagtaggggttctgagaggaaggtcccccacattggaactgagacacggtccagactcctacgggaggcagcagtgaggaatattggtcaatggccgcaaggctgaaccagccaagtagcgtgaaggatgacggccctccgggttgtaaacttcttttgtcggagattaaggtgccccacgcgctggggtattgcagtaatccgtcgaa

SEQ ID NO: 9133 - DNA, 490 bp, unidentified
  misc_feature 1..490: note = Ascusbbf_1592375, encodes 16S rRNA
  source 1..490: mol_type = genomic DNA
agagtttgatcctggctcaggacaaacgctggcggggtgcgtgagacatgcaagtcgaacgaggtgccaacgagcttgctcgatggctacctagtggcggacggctgagtaacgcgtaggtgacctgcccggaagtggggaataactgcccgaaagggtggctaataccgcatgtggtcggcgattcggttcgccgtctaaaggagtaatccgcttccggcggggcctgcgtccgattagctagttggtggggtaacggctcaccaaggcgacgatcggtagctggtctgagaggatgatcagccagactgggactgaggacggcccagactcctacgggaggcagcagtcgggaattttcggcaatggggggaaccctgaccgagcaacgccgcgtgagtgaagaaggttttcggatcgtaaaactctgttgttagagaagaacgttgcatagagtggaaagttatgcaagtgacggtatctaaccaga

SEQ ID NO: 9134 - DNA, 490 bp, unidentified
  misc_feature 1..490: note = Ascusbbf_684430, encodes 16S rRNA
  source 1..490: mol_type = genomic DNA
agagtttgatcatggctcaggatgaacgctggcggcgtgcctaacacatgcaagtcgaacgtgaggggatagcaatatctctgaaagtggcgaacgggtgagtaacacgtaggtaacctgccgcgcagagggggataacgactagaaatggtcgctaataccgcatggtactatccaaacgggagttcgggtggttaaaactttggtgctgcgcgaggggtctgcgtccgattagttagttggtgaggtaatggctcaccaagacgatgatcggtagctggtctgagaggatgatcagtcacacgggaactgagacacggtcccgactcctacggggggcagcagtgaggaatattgcacaatggacgcaagtctgatgcagcaacgccgcgtggaggatgaaggcccttgggtcgtaaactccttttttcagggaagagtgaggacggtacctgaagaataagtcacggctaactacgtgccagcagcc

SEQ ID NO: 9135 - DNA, 490 bp, unidentified
  misc_feature 1..490: note = Ascusbbf_854666, encodes 16S rRNA
  source 1..490: mol_type = genomic DNA
agagtttgatcctggctcaggatgaacgctggcggcgtgcttaacacatgcaagtcgaacgaaccaataggagcttgctccttgcggttagtggcggatgggtgagtaacgcgtgggtaatctgccttatacaatggaataactcagagaaatctgtgctaaaaccttataagcttacactgccgcatggcagagtaagaaaaactttagtggtataagatgagcccgcgtccgattagctagttggtgagataatagctcaccaaggcaacgatcggtaaccggcctgagagggtggacggtcacactgggactgagacacggcccagactcctacgggaggcagcagtggggaatattgcacaatgggggaaaccctgatgcagcaacgccgcgtgaaggatgaaggttttcggatcgtaaacttctatcagtagggaagaaaaaaatgacagtacctaactaagaagccccggctaactacgtgcca

SEQ ID NO: 9136 - DNA, 483 bp, unidentified
  misc_feature 1..483: note = Ascusbbf_1361515, encodes 16S rRNA
  source 1..483: mol_type = genomic DNA
agagtttgatcctggctcagaacgaacgctggcggcaggcttaacacatgcaagtcgaacgccccgcaaggggagtggcagacgggtgagtaacgcgtgggaatctaccctttgctacggaatagctccgggaaactggaattaataccgtatgtgcccattgtccttggcggatggtggggaaagatttatcggcaaaggatgagcccgcgttggattagctagttggtggggtaaaggcctaccaaggcgacgatccatagctggtctgagaggatgatcagccacattgggactgagacacggcccaaactcctacgggaggcagcagtggggaatattggacaatgggcgcaagcctgatccagccatgccgcgtgagtgatgaaggccctagggttgtaaagctctttcaccggtgaagataatgacggtaaccggagaagaagccccggctaacttcgtgccagcagccgcggtaat

SEQ ID NO: 9137 - DNA, 490 bp, unidentified
  misc_feature 1..490: note = Ascusbbf_1753100, encodes 16S rRNA
  source 1..490: mol_type = genomic DNA
agagtttgatcctggctcaggacgaacgctggtggcgtgcttaacacatgcaagtcgagcgaggcgtccgccttcgggcggtcagtcgagcggcgaacgggtgagtaacacgtgagcaatctccccttggctcggggataacctcgggaaactgaggctaataccggatactctttttctggggcctcccggaaaaaggaaaggtttcgcaccgtgaggtgcggttccggccttgaatgagctcgcggcctatcagcttgttggtgcggtaaatgcgcaccaaggcgacgacgggtagccggcctgggagggtgatcggccacactgggactgagatacggcccagactcctacgggaggcagcagtggggaatcttgcgcaatgggcgaaagcctgacgcagcaacgccacgtgggggatgacggccttcgggttgtaaacctctttcggtcttgacgaagacatccctgctaggggtgttgacggtag

SEQ ID NO: 9138 - DNA, 490 bp, unidentified
  misc_feature 1..490: note = Ascusbbf_856589, encodes 16S rRNA
  source 1..490: mol_type = genomic DNA
agagtttgatcatggctcaggatgaacgctagctacaggcttaacacatgcaagttgaacgggaatgtttgatagcttgctattaagcatgagagtagcgcactggtgagtaacacgtgggaacgtgccttttagtgggggacaacagttggaaacgactgctaataccgcatacgccctgagggggaaagatttatcgctaaaagatcggcccgcggaagattaggtagtaggtggggtaaaggcctacctagccgacgatctatagctggtctgagaggacgatcagccacattggaactgagacacggtccagactcctacgggaggcagcagtgaggaatattggtcaatggtcggaagaccgaaccagccaagtagcgtgagggatgactgccctatgggttgtaaacctcttttattggggaacaaaggggatcacgtgtggtcctttgcgtgtaccctatgaataagcatcggctaattccgt

SEQ ID NO: 9139 - DNA, 490 bp, unidentified
  misc_feature 1..490: note = Ascusbbf_1586849, encodes 16S rRNA
  source 1..490: mol_type = genomic DNA
agagtttgatcctggctcaggacgaacgctggcggcgtgcctaatacatgcaagtcgaacgagaattcgtggatagaggtttcggccaattgaagcggaggaaagtggcggacgggtgagtaacgcgtgaggaacctgcctttcagagggggacaacagttggaaacgactgctaataccgcatgatgcataggagtcgcatggctcttatgccaaagatttatcgctgaaagatggcctcgcgtctgattagctagttggtgaggtaacggcccaccaaggcgacgatcagtagccggactgagaggttgaacggccacattgggactgagatacggcccagactcctacgggaggcagcagtggggaatcttccgcaatggacgaaagtctgacggagcaacgccgcgtgagtgaagaaggtcttcggattgtaaagctctgttgtaagggaagaacgtcaggcagaggatgcttgagtgacggtacc

SEQ ID NO: 9140 - DNA, 490 bp, unidentified
  misc_feature 1..490: note = Ascusbbf_1575189, encodes 16S rRNA
  source 1..490: mol_type = genomic DNA
agagtttgatcctggctcaggacgaacgctggcggcgtgcttaacacatgcaagtcgagcggaaaggccacttcggtggtactcgagcggcgaacgggtgagtaacccgtgagtaatctgccccggacttcgggatagcccaccgaaaggtggattaataccggatatgacacatcttcgcatgttggtgtgtggaaagttttttcggtctgggatgtgctcgcggcctatcagcttgatggtgaggtaatggctcaccatggcttcgacgggtagccggcctgagagggtgaccggtcacactgggactgagacacggcccagactcctgcgggaggcagcagtggggaatattgcacaatggagggaactctgatgcagcgacgccgcgtgagtgaagaagtatttcggtatgtaaagctctatcagcagggaagaagacgacggtacctgactaagaagccccggctaactacgtgccagcagctgc

SEQ ID NO: 9141 - DNA, 490 bp, unidentified
  misc_feature 1..490: note = Ascusbbf_547744, encodes 16S rRNA
  source 1..490: mol_type = genomic DNA
agagtttgatcatggctcaggacgaacgctggcggcgtgcttaacacatgcaagtcgaacggtaaggccccagcttgctggggtacacgagtggcgaacgggtgagtaacacgtgggtgacctgccccgcacttcgggataagcctgggaaactgggtctaataccggataggaccgcaccgtgagggtgtggtggaaagtttttcggtgtgggatgggcccgcggcctatcagcttgttggtggggtaatggcctaccaaggcggcgacgggtagccggcctgagagggtggacggccacattgggactgagacacggcccagactcctacgggaggcagcagtggggaatcttccgcaatgggcgcaagcctgacggagcaacgccgcgtgagtgaggaagtttttcggaacgtaaagctctgttgtacccgacgaacgtgccacctatgtacaacgggtggtaatgacggtagggtgcgaggaagcc

SEQ ID NO: 9142 - DNA, 490 bp, unidentified
  misc_feature 1..490: note = Ascusbbf_1632242, encodes 16S rRNA
  source 1..490: mol_type = genomic DNA
agagtttgatcatggctcaggatgaacgctggcggcatgcctaagacatgcaggtcgaacgaagtagcctaatgaagattgcgtgcttgcacaaaattggatttagattcctacttagtggcagacgggtgagtaacacgtgggtaacctaccttggagactgggataacagttagaaatgattgctaataccggatgattcatagatagataactatttatgctaaaaggagctttcgcttcacttcaagatgggcttgcgttgtattagttagttggtggggtaatggcctaccaagacaacgatgcatatccgagctgagaggctgatcggacacattgggactgagacacggcccagactcctacgggaggcagcagtggggaatcttccgcaatgggcgcaagcctgacggagcaacgccgcgtgagtgaggaagtttttcggaacgtaaagctctgttgtacccgacgaacgtgccacctatga

SEQ ID NO: 9143 - DNA, 470 bp, unidentified
  misc_feature 1..470: note = Ascusbbf_1292390, encodes 16S rRNA
  source 1..470: mol_type = genomic DNA
agagtttgatcatggctcagaacgaacgctggcggcaggcttaacacatgcaagtcgaacgaagtcttcggacttagtggcagacgggtgagtaacgcgtgggaatctacccagtcctacgggatagctccaggaaactggaattaataccgtatacgcccttttggggaaagatttatcgggattggatgagcccgcgtaagattagctagttggtggggtaatggcctaccaaggcgacgatctttagctggtctgagaggatgatcagccacactgggactgagacacggcccagattcctacgggaggcagcagtggggaatattggacaatgggggcaaccctgatccagccatgccgcgtgagtgatgaaggccttagggttgtagagctctttcaccggagaagataatgacggtatccggagaagaagccccggctaacttcgtgccagcagccgcggtaat

SEQ ID NO: 9144 - DNA, 490 bp, unidentified
  misc_feature 1..490: note = Ascusbbf_490060, encodes 16S rRNA
  source 1..490: mol_type = genomic DNA
agagtttgatcctggctcaggacgaacgctggcggcgtgcttaacacatgcaagtcgagcgatgaagccccttcgggggtggattagcggcggacgggtgagtaacacgtgggtaacctgcctcaaagagggggatagcctcccgaaagggagattaataccgcataaagcagaattccacatggagttttgatgaaaggagtaatccgctttgagatggacccgcggcctgttagctagttggcggggcaacggcccaccaaggcgactatgggtagctgggttgagagaccgaccagccagattgggactgagacacggcccagactcctacgggaggcagcagtggggaatcttgcgcaatgggcggaagcctgacgcagcgacgccgcgtgcgggaggaaggccctcgggtcgtaaaccgctttcagcagggacgaggccgcaaggtgacggtacccgcagaagaggccccggctaactacgtgcc

SEQ ID NO: 9145 - DNA, 490 bp, unidentified
  misc_feature 1..490: note = Ascusbbf_1507442, encodes 16S rRNA
  source 1..490: mol_type = genomic DNA
agagtttgatcctggctcaggacgaacgctggcggcgtgcttcatacatgcaagtcgaacgagaaattcacttcggtggatggaaagtggcggacgggtgagtaatgtgtagagaatctgccctggagtgggggacaacagagggaaacttctgctaataccccatatgagcgtagttgcgatactattcttgaaagatttatcgctccaggatgagtctgcatctgattagctagttggaggtgtaatggaccaccaaggcaacgatggataggggttctgagaggaaggtcccccacactggaactgagacacggtccagactcctacgggaggcagcagtgaggaatattggtcaatggacgagagtctgaaccagccaagtagcgtgcaggatgacggccctatgggttgtaaactgcttttatgcggggataaagtgagggacgtgtcccttattgtaggtaccgcatgaataaggaccggctaa

SEQ ID NO: 9146 - DNA, 470 bp, unidentified
  misc_feature 1..470: note = Ascusbbf_594923, encodes 16S rRNA
  source 1..470: mol_type = genomic DNA
agagtttgatcctggctcagagcgaacgctggcggaatgcttaacacatgcaagtctcacgggcagcaatgtcagtggcggacgggtgagtaacgcgtaggaatgtgtcctgggatgggggataacgtcgggaaactggcgctaataccgcatatgagctgaggctcaaagccgcgaggcgtcttgggagcagcctgcgtccgattagcttgttggtggggtaaaggcctaccaaggctacgatcggtagctggtctgagaggatgatcagccacactggaactgagacacggtccagactcccacgggaggcagcagtggggaatattggacaatgggcgaaagcctgatccagcaattccgcgtgggtgaagaaggtcttcggattgtaaagccctttcgacgggaacgatgatgacggtacccgtagaagaagccccggctaacttcgtgccagcagccgcggtaat

SEQ ID NO: 9147 - DNA, 490 bp, unidentified
  misc_feature 1..490: note = Ascusbbf_874830, encodes 16S rRNA
  source 1..490: mol_type = genomic DNA
agagtttgatcctggctcagaacgaacgctggcggcgtgcttaatacatgcaagtcgcacgagaaagtccttcgggatgagtaaagtggcgcacgggagagtaatgcataggaacgtacctgtaggtggggaataaccactggaaacggtggctaataccgcacggtgtcgcaagactaaagttggcctctatttataagctagcgcctacagagcggcctatgtcccattagctagttggcggggtaatagcccaccaaggcgacgatgggtagctggtcttagaggatgatcagcctcactgggactgagacacggcccagactcctacgggaggcagcagtagggaattttgcacaatgggcgcaagcctgatgcagcaacgccgcgtgagtgaagaaggcccttgggttgtaaagctctttcagctggaaagaagggacgtcctgcgaacagttggatgttttgacggtaccagcacaagaagcac

SEQ ID NO: 9148 - DNA, 490 bp, unidentified
  misc_feature 1..490: note = Ascusbbf_568212, encodes 16S rRNA
  source 1..490: mol_type = genomic DNA
agagtttgatcatggctcaggatcaacgctggcggcgtgcctaatgcatgcaagtcgagcggggtgatcttcggatcacttacgcggcggacgggtgcggaacacgtgggcaacctgccccgaggtgggggatagccggtggaaacaccgggtaatcccgcataaggtcgccagtcggaggactggtgaggaaaggctcttcggagtcgccttgggaggggcctgcggccgattagctagacggtggggtaacggcctaccgtggcgatgatcggtagctggtctgagaggacggccagccacacggggactgagacacggccccgactcctacgggaggcagcagtgaggaatattggtcaatgggcgaaagcctgaaccagccaagtagcgtgcaggacgacggccctatgggttgtaaactgcttttataggggaataaagttatccacgtgtggatatttgcatgtaccctatgaataaggaccgg

SEQ ID NO: 9149 - DNA, 490 bp, unidentified
  misc_feature 1..490: note = Ascusbbf_1334275, encodes 16S rRNA
  source 1..490: mol_type = genomic DNA
agagtttgatcctggctcaggatgaacgctagctacaggcttaacacatgcaagtcgaggggcagcatgacggaagcttgcttccgttaatggcgaccggcgcacgggtgagtaacgcgtatccaacctgcccttgtccatcggataacccgtcgaaaggcggactaacacgatatgcagtccacagcaggcatctaacgtggacgaaatgtgaaggagaaggatggggatgcgtctgattagcttgttggcggggtaacggcccaccaaggcgacgatcagtaggggttctgagaggaaggtcccccacattggaactgagacacggtccaaactcctacgggaggcagcagtgaggaatattggtcaatgggcgagagcctgaaccagccaagtagcgtgcaggatgacggccctatgggttgtaaactgcttttataagggaataaagttagtctcgtgagactttttgcatgtaccttatgaataa

SEQ ID NO: 9150 - DNA, 152 bp, unidentified
  misc_feature 1..152: note = Ascusbbf_610314, encodes 16S rRNA
  source 1..152: mol_type = genomic DNA
agagtttgatcatggctcagagcctcgtacatcgctttgagattgtttaaatcgttgtgatctagtgcgttcgctaaaacaatccattggttcagtttaggatcaaacatctgatcagcaatcgttagcggttcgccagcagccgcggtaat

SEQ ID NO: 9151 - DNA, 490 bp, unidentified
  misc_feature 1..490: note = Ascusbbf_1325933, encodes 16S rRNA
  source 1..490: mol_type = genomic DNA
agagtttgatcatggctcaggatgaacgctagctacaggcttaacacatgcaagtcgagcgggcccttcggggtcagcggcagacgggtgagtaacacgtggaaacgtaccctttggttcggaataacgctgggaaactagcgctaataccggatacgcccttggcctttggccctggggaaaggcttgctgccgaaggatcggcccgcgtctgattagctagttggtggggtaatggcccaccaaggcgacgatcggtaggggctctgagaggaggatcccccacattggaactgagacacggtccaaactcctacgggaggcagcagtggggaatattggtcaatgggcgagagcctgaaccagccaagtagcgtgagggatgactgccctatgggttgtaaacctcttttgtttgggaataaagtgagccacgtgtggctttttgtatgtaccttacgaataagcatcggctaattccgtgccagca

SEQ ID NO: 9152 - DNA, 488 bp, unidentified
  misc_feature 1..488: note = Ascusbbf_541202, encodes 16S rRNA
  source 1..488: mol_type = genomic DNA
agagtttgatcctggctcagaacgaacgctggcggcaggcttaacacatgcaagtcgagcgccccgcaaggggagcggcagacgggtgagtaacgcgtgggaatctacccatctctacggaataactcagggaaacttgtgctaataccgtatacgcccttcgggggaaagatttatcggagatggatgagcccgcgtccgattaggtagttggtgaggcaacggctcaccaagccgacgatcggtagccggactgagaggtcgatcggccacattgggactgagacacggcccagactcctacgggaggcagcagtgaggaatattggtcaatgggcgagagcctgaaccagccaagtagcgtgcaggatgacggccctatgggttgtaaactgcttttgcatgggaataaagtgagggacgtgtccctttttgtatgtaccatgagaataaggaccggctaattccgtgccagcagccgcggtaat

SEQ ID NO: 9153 - DNA, 490 bp, unidentified
  misc_feature 1..490: note = Ascusbbf_983749, encodes 16S rRNA
  source 1..490: mol_type = genomic DNA
agagtttgatcatggctcaggacgaacgctggcggcgtgcttcattcatgcaagtcgaacgataaggtctcttcggagatacataagtggcggacgggtgagtaaaatgtagagaatctgccctagagcgggggataacagagggaaacttctgctaataccccatatgcgcgtagttgagatactattcgtgaaaactccggtgctctaggatgagtctgcatctgattagctagttggcggtgtaatggaccaccaaggcgacgatcggtaggggttctgagaggaaggccccccacaatggaactgagacacggtccatactcctacgggaggcagcagtgggggatattgcgcaatgggggcaaccctgacgcagcaatgccgcgtgagtgaagaagtatttcggtatgtaaagctctatcagcagggaagataatgacagtacctgaccaagaagccccggctaactacgtgccagcagccgcgg

SEQ ID NO: 9154 - DNA, 490 bp, unidentified
  misc_feature 1..490: note = Ascusbbf_984977, encodes 16S rRNA
  source 1..490: mol_type = genomic DNA
agagtttgatcatggctcaggatgaacgctggcggcatgcctaagacatgcaagtcgaacgaggtggcccaaagaagattgagtgcttgcacaagattggaattggattaccacctagtggcggacgggtgagtaacacgtaggtgacctgcctttgagtttgggataactattagaaatgatagctaataccggattaaatatagattcatttctatattaaaaggagcctttaaagcttcgcttaaagatgggcctgcggcgtattagctagttggcgaggtaatggcttaccaaggcgacgatgcgtagccgaactgagaggttgatcggccacattgggactgagacacggcccaaactcctacgggagacagcagttaggaatattcgtcaatgggggaaaccctgaacgagcaatgccgcgtgaaggatgaaggttttcggattgtaaacttcttttattaaggacgaataatgacggtactta

SEQ ID NO: 9155 - DNA, 490 bp, unidentified
  misc_feature 1..490: note = Ascusbbf_1794113, encodes 16S rRNA
  source 1..490: mol_type = genomic DNA
agagtttgatcatggctcaggatgaacgctggcggcgtgcttaacacatgcaagtcgaacgaggaatactgatgaagttttcggatggaatcggtattccgagtggcggacgggtgagtaacgcgtgggtaacctgctgtacagggggataacagttggaaacgactgttaataccgcataagaccacagtgccgcatggcacaggggtaaaaactccggtggtacaggatggacccgcgtccaattagctagttggtgaggtaacggcccaccaaggcgacgattggtagccgatctgagaggatgaccggccacattgggactgagacacggcccaaactcctacgggaggcagcagtggggaatattgcacaatgggggaaaccctgatgcagcgacgccgcgtgagtgatgaagtgtttcggctcgtaaagctctgttgtcggggacgaatgtcaaaggtgtgaacaatgtctttgaatgacggta

SEQ ID NO: 9156 - DNA, 490 bp, unidentified
  misc_feature 1..490: note = Ascusbbf_643127, encodes 16S rRNA
  source 1..490: mol_type = genomic DNA
agagtttgatcctggctcaggatgaacgctagcgacaggcttaacacatgcaagtcgaacgaagcaattgcgacagaagccttcgggtggaagatgtaattgactgagtggcggacgggtgagtaacgcgtgggtaacctgccttgtacagggggataacagttagaaatgactgctaataccgcataagcgcacagtatcgcatgatacagtgtgaaaaactccggtggtatgagatgggcccgcgtcagattagccagttggcagggtaacggcctaccaaagcgacgatctgtagccggcctgagagggcggacggccacattgggactgagacacggcccaaactcctacgggaggcagcagtgggggatattgcgcaatgggggcaaccctgatgcagcaacgccgcgtgagggaggacggtcttcggattgtaaacctctgtccttggggaagaaacaaatgacggtacccttggaggaagcca

SEQ ID NO: 9157 - DNA, 485 bp, unidentified
  misc_feature 1..485: note = Ascusbbf_577058, encodes 16S rRNA
  source 1..485: mol_type = genomic DNA
agagtttgatcctggctcagaacgaacgctggcggcgtggataagacatgcaagtcgaacgaagtggcttcggtcacttagtggcgcacgggtgagtaacacgtgagcaacctgcccctgagacagggatagccccgggaaactgggattaatacctgatggtctcgcaagagtaaagtagcaatacgctcagggaggggctcgcggcctattagttagttggcggggtaacggcccaccaaggcgatgacgggtagccggtctgagaggatgtccggccacactggaactgagacacggtccagacacctacgggtggcagcagtcgagaatcattcacaatgggcgaaagcctgatggtgcgacgccgcgtgggggaggaaggtcttcggattgtaaacccctgtcatgcaggagcaagacgcaagtttgatagtactgcaagaggaagagacggcaaactctgtgccagcagccgcagtaat

SEQ ID NO: 9158 - DNA, 490 bp, unidentified
  misc_feature 1..490: note = Ascusbbf_1559391, encodes 16S rRNA
  source 1..490: mol_type = genomic DNA
agagtttgatcctggctcaggatgaacgctagcggcaggcctaatacatgcaagtcgaacgagattggaagagcttgcttttccatgaaagtggcgcacgggtgcgtaacgcgtatgcaacctaccttaatcagggggatagcctctcgaaagagagattaacaccgcataatatcattttccggcatcggagaatgatcaaatatttataggattaagatgggcatgcgtgacattagttagttggtgaggtaacggctcaccaagacgatgatgtctaggggatctgagaggatgaccccccacactggtactgagacacggaccagactcctacgggaggcagcagtaaggaatattggtcaatggaggcaactctgaaccagccatgccgcgtgcaggaagacggccctatgggttgtaaactgcttttatacgggaataaacccctttacgtgtagagggttgaatgtactgtaagaataaggat

SEQ ID NO: 9159 - DNA, 490 bp, unidentified
  misc_feature 1..490: note = Ascusbbf_516504, encodes 16S rRNA
  source 1..490: mol_type = genomic DNA
agagttgatcctggctcaggataaacgctggcggcgcacataagacatgcaagtcgaacggacttaactcattcttaacgattgagagcggttagtggcggattggtgagtaatgtataagtaacctgcctatcagaggggaacaacagttggaaacgactgctaataccgcatgagaccacggtttcgcatggaactgaggtaaaaggatttattcgatgcaggatgggctcgcgtcccattagatagttggtgaggtaacggctcaccaagtcaacgatgggtagccgacctgagagggtgatcggccacactggaactgagacacggtccagactcctacgggaggcagcagtggggaatattgggcaatgggcgaaagcctgacccaacaacgccgcgtgagggaagaaggtcttcggattgtaaacctttgtcctatggggcgaaacaaatgacggtaccataggaggaagctccggctaactac

SEQ ID NO: 9160 - DNA, 490 bp, unidentified
  misc_feature 1..490: note = Ascusbbf_1334421, encodes 16S rRNA
  source 1..490: mol_type = genomic DNA
agagtttgatcatggctcaggacgaacgctggcggcgcgcctaacacatgcaagtcgaacggggcataatttagatttcttcggaatgataggttatagcctagtggcggacgggtgagtaacacgtgagcaatctgccttacagatggggataacggccagaaatgggtgctaatacccaatgacatatggtattcgcatgaatggcatattaaaggaattcgcaagaattttgctgtgagatgagctcgcggtcgattatgatagttggtgaggtaatggctcaccaagtctacgatcgatagccgaactgagaggttgatcggccacattgggactgagacacggcccagactcctacgggaggcagcagtcgggaatattgcacaatgggggaaaccctgatgcagcgacgccgcgtgaaggaagaagtatctcggtatgtaaacttctatcagcagggaagaaaatgacggtacctgactaagaa

SEQ ID NO: 9161 - DNA, 490 bp, unidentified
  misc_feature 1..490: note = Ascusbbf_1496757, encodes 16S rRNA
  source 1..490: mol_type = genomic DNA
agagtttgatcctggctcaggatgaacgctggcggcgtgcttaacacatgcaagtcgaacgaggtataaggacggaagttttcggacggaagaccttgtactgagtggcggacgggtgagtaacgcgtgggaaacctgccctgttccgggggataccagttggaaacgactgttaataccgcataagcgcacagcttcgcatggagcagtgtgaaaaactccggtggtgtgagatggacccgcgtctgattagatagttggtggggtaacggcctaccaagccgacgatcagtagccgacctgagagggtgaccggccacattgggactgagacacggaccaaactcctacgggaggcagcagtgaggaatattggtcaatgggcgaaagcctgaaccagccaagtagcgtgcaggatgacggccctatgggttgtaaactgcttttataggggaataaagttatccacgtgtggatatttgcatgtacc

SEQ ID NO: 9162 - DNA, 480 bp, unidentified
  misc_feature 1..480: note = Ascusbbf_1667181, encodes 16S rRNA
  source 1..480: mol_type = genomic DNA
agagtttgatcctggctcagaacgaacgctggcggcaggcctaacacatgcaagtcgagcgagatcttcgggtctagcggcggacgggtgagtaacgcgtgggaatatgccctttgctacggaatagtcctgggaaactgggggtaataccgtatacgcccttttggggaaagatttatcggcgaaggattagcccgcgttggattaggtagttggtggggtaatggcctaccaaggcgatgatctctagctggtctgagaggatgaccagccacactggaactgagacacggtccagactcctacgggaggcagcagtagggaatattgcacaatggggggaaccctgatgcagccatgccgcgtgtgtgaagaaggccttcgggttgtaaagcactttcagtcaggaggaaggtagtgatacttgacgttactgacagaagaagcaccggctaactccgtgccagcagccgcggtaat

SEQ ID NO: 9163 - DNA, 490 bp, unidentified
  misc_feature 1..490: note = Ascusbbf_1794454, encodes 16S rRNA
  source 1..490: mol_type = genomic DNA
agagtttgatcatggctcaggatgaacgctggcggcgtgcttaacacatgcaagtcgaacggtgaagccaagcttgcttggtggatcagtggtgaacgggtgagtaacacgtgagcaacctgccctggactctgggataagcgctggaaacggcgtctaatactggatatgagcctctatcgcatggtgggggttggaaagattttttggtctgggatgggctcgcggcctatcagcttgttggtgaggtaatggctcaccaaggcgtcgacgggtagccggcctgagagggtgaccggccacattgggactgaggcacggcccagactcctacgggaggcagcagtgggggatattgcgcaatgggggcaaccctgacgcagcaacgccgcgtgaaggatgaaggttttcggattgtaaacttcttttattaaggacgaataatgacggtacttaatgaataagctccggctaactacgtgccagcagc

SEQ ID NO: 9164 - DNA, 490 bp, unidentified
  misc_feature 1..490: note = Ascusbbf_1644143, encodes 16S rRNA
  source 1..490: mol_type = genomic DNA
agagtttgatcctggctcaggatcaacgctggcggcgtgcctaatgcatgcaagtcgaacgggctcgccttcgggcgggtcacgtggcggacgggtgaggaacacgtgggcgacctaccctggggcgggggatagccgcgagaaatcgtgggtaattccgcatgtgctcccttgagcgtggcttgagggaggaaaggtgtgtttcggcacgccacccttggcggggcctgcggccgattagctagttgggggggtaacggcttcccaaggcgatgatcggtagctggtctgagaggacggccagccacacggggactgagacacggccccgactcctacgggaggcagcagcaaggaatcttccgcaatgggcgaaagcctgacggagcaacgccgcgtgcgggatgacgcctttcggggtgtaaaccgcttttctgggggaagaagacgggctttggtccgtttgacggtaccccaggaagaaggaccg

SEQ ID NO: 9165 - DNA, 490 bp, unidentified
  misc_feature 1..490: note = Ascusbbf_1101699, encodes 16S rRNA
  source 1..490: mol_type = genomic DNA
agagtttgatcctggctcaggacgaacgctggcggcgtgcctaacacatgcaagtcgaacggagtttgttggattgatccttcgggtgattgatagcaaacttagtggcggacgggtgagtaacacgtgagcaacctgccttacagagggggataacgttctgaaaagaacgctaataccgcataacatattgagtgggcatccacttgatatcaaaggagcaatccgctgtagatgggctcgcgtccgattagccagttggcggggtaacggcccaccaaagcgacgatcggtagccggactgagaggttgaacggccacattgggactgagacacggcccagactcctacgggaggcagcagtagggaattttgcgcaatgggcgaaagcctgacgcagcaacgccgcgtgatcgtagaagtccttcggggtgtaaagatctgtcagtagggacgaacaatgactgtacctacagaggaagcaccggc

SEQ ID NO: 9166 - DNA, 475 bp, unidentified
  misc_feature 1..475: note = Ascusbbf_1534519, encodes 16S rRNA
  source 1..475: mol_type = genomic DNA
agagtttgatcatggctcaggatgaacgctggcggcatgcctaatacatgcaagtcgtgcggaaacacttcgggtgtcgagcggcggacgggtgagtaacgcgttagtatctgccccaaactgagggataagccaaagaaatttggtctaataccgcatatggtcttcggattaaagccttcgggcggtttgggaggtgcttgcgtctgattagctagttggtaaggtaatggcttaccaaggctacgatcagtaactggtctgagaggatgatcagtcacactggaactgagacacggtccagactcctacgggaggcagcagtagggaattttccacaatgggcgaaagcctgatggagcaatgccgcgtgcaggatgaatgccttcgggttgtaaactgcttttatgagggaagattatgacggtacctcatgaataagcctcggctaactccgtgccagcagccgcggtat

SEQ ID NO: 9167 - DNA, 490 bp, unidentified
  misc_feature 1..490: note = Ascusbbf_1589380, encodes 16S rRNA
  source 1..490: mol_type = genomic DNA
agagtttgatcctggctcaggatgaacgccagctacaggctttacacatgcaagtcgagcgaggcggcccgcaagggccagtcgagcggcgaacgggtgagtaacgcgtggattatctgccctaaggtgggggataacccggggaaactcgggctaataccgcatatgaccgtgaggtcaaaggggggtcgcaagatctctcgccattggaggagtccgcgtccgattagctagttggtagggtaatggcctaccagggcgacgatcggtagccggcctgagagggtgatcggccacactggaactgagacacggtccagactcctacgggaggcagcagtggggaattttgcgcaatgggctaacgcctgacgcagcaacgccgcgtggaggatgaaggtctttggattgtaaactcctgtcagcagggaaaaagcgagccgacctcatacgtcggtgagttgattgtacctgcagaggaagccccggc

SEQ ID NO: 9168 - DNA, 490 bp, unidentified
  misc_feature 1..490: note = Ascusbbf_790677, encodes 16S rRNA
  source 1..490: mol_type = genomic DNA
agagtttgatcctggctcagaatcaacgctggcggcgtgcctcagacatgcaagtcgaacgattaaagctctcttcggagagtgtataaagtggcgcatgggtgagtaacacgtaagtaatctaccttcgagtggggaataacgttcggaaacgaacgctaataccgcataatgcagcggcacctaatggtgacagttgttaaaggagcaatccgcttgaagaggagcctgcggcagattaggtagttggtaaggtaatggcttaccaagcctgcgatctgtaaccggtcttagaggacggtcggtcacactgacactgaataacgggtcagactcctacgggaggcagcagtcgggaattttgggcaatgggcgaaagcctgacccagcaacgccgcgtgaaggatgaagtatttcggtatgtaaacttcgaaagaatgggaagaatcaatgacggtaccatttataaggtccggctaactacgtgcca

SEQ ID NO: 9169 - DNA, 485 bp, unidentified
  misc_feature 1..485: note = Ascusbbf_1260296, encodes 16S rRNA
  source 1..485: mol_type = genomic DNA
agagtttgatcctggctcaggacgaacgctggcggcgtgcttaacacatgcaagtcaaggggtagcaataccactggcgcacgggtgagtaacgcgtagataatctgcccctatctccggaataacatcaagaaattggtgctaaaaacggatgaggcacaatgtgtcaaaggtaacggatagggatgagtctgcgtctgattagctagttggtaaggtaatggcttaccaaggcgacgatcagtagctggtctgagaggacgatcagccacactggaactgagacacggtccagactcctacgggaggcagcagtgaggaattttgcacaatgggggaaaccctgatgcagcgacgccgcgtgcgggatgaaggggcttcgccctgtaaaccgctgtcggatgggaaaaaaagtctcctcgggagactgggattgtaccatcaaaggaaggaccggctaactacgtgccagcagccgcggtaat

SEQ ID NO: 9170 - DNA, 490 bp, unidentified
  misc_feature 1..490: note = Ascusbbf_1560168, encodes 16S rRNA
  source 1..490: mol_type = genomic DNA
agagtttgatcctggctcagagtgaacgctggcggcaggcctaacacatgcaagtcgagcggcagcgcgggggcaaccctggcggcgagcggcggacgggtgaggaatgcatcggaatctacctcgttgtgggggataacctcgggaaaccgggactaataccgcatacgacctacgggtgaaagtgggggaccgcaaggcctcacgcgatgagatgagccgatgccggattagctagttgggggggtaaaggcccaccaaggcgacgatccgtagctggtctgagaggatgatcagccacactggaactgagacacggtccagactcctacgggaggcagcagtggggaatgttggacaatgggcgcaagcctgatccagccatgccgcgtgtgtgaaggaggccttcgggctgtaaagcacttttgttggggaagaaaccggccggattaatacttcggctgaatgacggtacccaaagaataagcac

SEQ ID NO: 9171 - DNA, 490 bp, unidentified
  misc_feature 1..490: note = Ascusbbf_480930, encodes 16S rRNA
  source 1..490: mol_type = genomic DNA
agagtttgatcctggctcaggatgaacgctagctacaggcttaacacatgcaagtcgcggggcagcgcggccatagcttgctatggctggcggcgaccggcgcacgggtgagtaacgcgtatccaacctgccccccagtagggaacagcccggcgaaagtcggattaatgccctatgcacttgacggcgggcatctaatgtcaagtaaaggcgttttgtcgctgggggatggggatgcgtaggattaggcaggcggcggggcgacggcccaccgcgccgacgatccttaggggttctgagaggaaggtcccccacactggtactgagacacggaccagactcctacgggaggcagcagtgaggaatattggtcaatgggcgagagcctgaaccagccaagtagcgtgcaggacgacggccctacgggttgtaaactgcttttatgcggggataaagtgcgccacgtgtggcgctttgcaggtaccgcatg

SEQ ID NO: 9172 - DNA, 490 bp, unidentified
  misc_feature 1..490: note = Ascusbbf_372501, encodes 16S rRNA
  source 1..490: mol_type = genomic DNA
agagtttgatcatggctcaggataaacgctggcggcgtgcataacacattcaagtcgaacggaactgtacggattaatccttcgggaagcgtttgtacagtttagtggcggacgggtgagtaacgcgtgagcaacctgcctacgagaggggaataacgtctggaaacggacgctaataccgcataaaccgcggggttcgcatggaccccggggcaaagatttatcgctcgtagatgggctcgcgtccgattaggtagttggtggggcaacggctcaccaagccgacgatcggtagccggactgagaggttgaacggccacattggaactgagaaacggtccagactcctacgggaggcagcagtggggaatattgggcaatgggcgcaagcctgacccagcgacgccgcgtgagggaagaaggtcttcggattgtaaacctctttcggcagggaagacaaaaggacggtacctgcagaagaagccacggc

SEQ ID NO: 9173 - DNA, 490 bp, unidentified
  misc_feature 1..490: note = Ascusbbf_299634, encodes 16S rRNA
  source 1..490: mol_type = genomic DNA
agagtttgatcatggctcagattgaacgctggcggcaggcctaacacatgcaagtcgagcggaaacgatggaagcttgcttccaggcgtcgagcggcggacgggtgagtaatgcatgggaatctgcccgatagtgggggataacctggggaaacccaggctaataccgcatacgtcctacgggagaaagcaggggatcttcggaccttgcgctatcggatgagcccatgtcggattagcttgttggtggggtaatggcctaccaaggcgacgatccgtagctggtctgagaggatgatcagccacatcgggactgagacacggcccgaactcctacgggaggcagcagtggggaatattggacaatgggcgaaagcctgatccagccatgccgcgtgtgtgaagaaggccttcgggttgtaaagcactttcagtgaggaagaacgcctctggcttaatacgtcagagggaagacatcactcacagaagaa

SEQ ID NO: 9174 - DNA, 490 bp, unidentified
  misc_feature 1..490: note = Ascusbbf_1147335, encodes 16S rRNA
  source 1..490: mol_type = genomic DNA
agagtttgatcctggctcaggataaacgctggcggcgtgcctaatgcatgcaagtcgaacgggaaccacttcggtggtcgaccgtggcggacgggtgaggagcacgtggctaacctgcccgaatcttcgggataaccaccggaaacggtggctaataccggatgtgttggttggaggggactctggctaacaaagcgctctggtagcggattcggagggggctgcgtccgattagctagttggtgaggtaagagctcaccaaggcaacgatcggtagctggtctgagaggatgatcagccacacggggactgagacacggccccgactcctacgggaggcagcagcaaggaattttccacaatgggcgccagcctgatggagcaacgccgcgtgggggatgacgcgtttcggcgtgtaaaccccttttccgagggacgaaaatcatgacggtacctcgggaataaggtccggctaactacgtgccagcag

SEQ ID NO: 9175 - DNA, 399 bp, unidentified
  misc_feature 1..399: note = Ascusbbf_394653, encodes 16S rRNA
  source 1..399: mol_type = genomic DNA
agagtttgatcatggctcagttggaaacgactgctaataccgcatacgtcctacgggagaaagcaggggaccttcgggccttgcgctatcagatgagcctaggtcggattagctagttggtgaggtaatggctcaccaaggcgacgatccgtaactggtctgagaggatgatcagtcacactggaactgagacacggtccagactcctacgggaggcagcagtggggaatattggacaatgggcgaaagcctgatccagccatgccgcgtgtgtgaagaaggtcttcggattgtaaagcactttaagttgggaggaagggcagtaagctaataccttgctgttttgacgttaccgacagaataagcaccggctaacttcgtgccagcagccgcggtaat

SEQ ID NO: 9176 - DNA, 490 bp, unidentified
  misc_feature 1..490: note = Ascusbbf_1563649, encodes 16S rRNA
  source 1..490: mol_type = genomic DNA
agagtttgatcatggctcaggatgaacgctagcggcgggcttaatacatgcaagtcgaggggcagcacgggtagcaatacttggtggcgaccggcggacgggtgcgtaacacgtatgcaacttgccctatactgggaaatagcccgaagaaattcggattaatgtcccataacaacgagataggcatctattttgtttgaaagttccgacggtataggatgggcatgcgcaagattagctagttggtgaggtaacggctcaccaaggcgacgatctttagggggcctgagagggtgatcccccacactggtactgagacacggaccagactcctacgggaggcagcagtaaggaatattggtcaatggaggcaactctgaaccagccacgccgcgtgaaggatgacggccctatgggttgtaaacttcttttgtatggggataaacctttctacgtgtaggaagctgaaggtaccatacgaataagcatc

SEQ ID NO: 9177 - DNA, 490 bp, unidentified
  misc_feature 1..490: note = Ascusbbf_638806, encodes 16S rRNA
  source 1..490: mol_type = genomic DNA
agagtttgatcctggctcaggatgaacgctggcggcgtgcttaacacatgcaagtcgaacgaagaggtgctgagggataggcttcggtcttgaacacggtacatatcttagtggcggacgggtgagtaacgcgtgggcaacctgccctttacaggggaataatcattggaaacgatgactaataccgcatgtccccgagataaggcatcttatttcggaaaaaggagcaatccggtaaaggatgggcccgcgtctgattagcttgttggtggggtaacggcctaccaaggcgacgatcagtagccgacctgagagggtgatcggccacattgggactgagacacggcccaaactcctacgggaggcagcagtggggaatattgcacaatggggggaaccctgatgcagcaacgccgcgtgaaggaagaaggttttcggatcgtaaacttctatcaacagggacgaaggaagtgacggtacctgaataaga

SEQ ID NO: 9178 - DNA, 490 bp, unidentified
  misc_feature 1..490: note = Ascusbbf_952454, encodes 16S rRNA
  source 1..490: mol_type = genomic DNA
agagtttgatcatggctcaggatcaacgctggcggcgtgcctaatgcatgcaagtcgaacggggatgccttcgggtatctcacgtggcggacgggtgaggaacacgtgggcaatctgcccactggtggggggtagccatcggaaacggtgggtaattccgcatgagctggtttgccgagtggggtgaatcaggaaagcctttgggcgccagtggaggagcctgcgaccgattagctagttggggtggtaacggcatcccaaggcgatgatcggtagctggtctgagaggatggccagccacacggggactgagacacggccccgactcctacgggaggcagcagcaaggaattttccgcaatgggcgaaagcctgacggagcaacgccgcgtgcgggatgacgcatttcggtgtgtaaaccgctgttcgtggggacgaagcactgacggtacccacggaggaaggcccggctaactacgtgccagcagcc

SEQ ID NO: 9179 - DNA, 490 bp, unidentified
  misc_feature 1..490: note = Ascusbbf_1371838, encodes 16S rRNA
  source 1..490: mol_type = genomic DNA
agagtttgatcatggctcaggatgaacgctagcggcaggcttaacacatgcaagtcgaggggtaacgcggggtagcaatactctggcgacgaccggcgcacgggtgcgtaacgcgtatgcaacctacctgtaacaggggtataacggagagaaatttccactaatcccccatattgttattctttcgcatgttaggataacgaaagcttcggtggttacggatgggcatgcgtgacattagctagttggtaaggtaacggcttaccaaggcgacgatgtctaggggagctgagaggcttatccacagaacgggaacgaggccacggaccagattcctacgggaggcagaagtgaggaatattggtcaatggacggaagtctgaaccagccatgccgcgtggaggaagaaggtcctatgggttgtaaactccttttgttcgagagtaataagggctttgcgaagcccgatgagagtatcggacgaataagc

SEQ ID NO: 9180 - DNA, 490 bp, unidentified
  misc_feature 1..490: note = Ascusbbf_245434, encodes 16S rRNA
  source 1..490: mol_type = genomic DNA
agagtttgatcctggctcaggatgaacgctagcgacaggcctaacacatgcaagtcgaggggcatcgggtggttagcttgctaaccatgccggcgaccggcgcacgggtgagtaacgcgtgtgcaacctttccgtgtccccgggacagtcggccgaaaggccgcgtaaccccgggcgttccggtcgtcgggcatccgtcggccggtatacgagagggacacgggtgggcacgcgtccgattagccagccggcggggtaacggcccaccggggcgacgatcggtaggggttctgagaggaaggtcccccacattggaactgagacacggtccaaactcctacgggaggcagcagtgaggaatattggtcaatgggcgcgagcctgaaccagccaagtcgcgtgagggaggaaggccctacgggtcgtaaacctcttttgtcggggaacaacggcggggtcgtgaccccgcgtgagcgtacccgtcgaataa

SEQ ID NO: 9181 - DNA, 490 bp, unidentified
  misc_feature 1..490: note = Ascusbbf_107277, encodes 16S rRNA
  source 1..490: mol_type = genomic DNA
agagtttgatcatggctcagattgaacgctggcggcaggcctaacacatgcaagtcgagcggtagaaagtagcttgctacttttgagagcggcggacgggtgagtaacgcgtgggaatctaccgagtagtgggggacaacagccggaaacggctgctaataccgcatacgccctacgggggaaagggggggatcttcggacctctcgctatttgatgagcccgcgtcggattagctagtaggtgaggtaatggctcacctaggcgacgatccgtagctggtctgagaggatgatcagccacactggaactgagacacggtccagactcctacgggaggcagcagtggggaatattgcacaatgggcgaaagcctgatgcagccatgccgcgtgtgtgaagaaggctttcgggttgtaaagcactttcagcgaggaggaaggcctgtcggttaatatccgacaggattgacgttactcgcagaagaagcac

SEQ ID NO: 9182 - DNA, 490 bp, unidentified
  misc_feature 1..490: note = Ascusbbf_413088, encodes 16S rRNA
  source 1..490: mol_type = genomic DNA
agagtttgatcatggctcagaatgaacgttggcggcatggattaggcatgcaagtcgcacgagaagtggagtagcttgctacgaaacggacagtggcgaaagggagagtaacgcgtggttacatgcctccaggaccaggatagcgttgggaaactagcggtaatactggatgatatctacggatcaaatggtgtgattccgcctggagattggactgcgtactattagcttgttggtggggtaaaggcctaccaaggctgcgatggttaccgggtgtgagagcatggcccggctcactgggactgagacactgcccagacatctacggatggctgcagtcgagaatcttcggcaatggacgaaagtctgaccgagcgatgccgcgtgcgggatgaaggccctcgggttgtaaaccgctgtcagttgggaggaaatgccatggggctatccccatggcttgactaatcttcagaggaaggacgggctaagt

SEQ ID NO: 9183 - DNA, 490 bp, unidentified
  misc_feature 1..490: note = Ascusbbf_160329, encodes 16S rRNA
  source 1..490: mol_type = genomic DNA
agagtttgatcatggctcaggatgaacgctggcggcgtgcttaacacatgcaagtcgaacggtgaagcagagcttgctctgtggatcagtggcgaacgggtgagtaacacgtgagcaatctgcccctgactctgggataacagttggaaacagctgctaataccggatacgagctgcgaccgcatggtcggcagttggaaagaacttcggtcagggatgagctcgcggcctatcagcttgttggtgaggtaatggctcaccaaggcgtcgacgggtagccggcctgagagggtgaccggccacactgggactgagacacggcccagactcctacgggaggcagcagtggggaatattgcacaatgggcgaaagcctgatgcagcaacgccgcgtgagggatgacggccttcgggttgtaaacctcttttagcagggaagaagcgaaagtgacggtacctgcagaaaaagcgccggctaactacgtgccag

SEQ ID NO: 9184 - DNA, 490 bp, unidentified
  misc_feature 1..490: note = Ascusbbf_1483300, encodes 16S rRNA
  source 1..490: mol_type = genomic DNA
agagtttgatcatggttcaggatgaacgctagctacaggcttaacacatgcaagtcgaggggcagcagggggtggcaacatcccgctggcgaccggcgcacgggtgcgtaacgcgtgttcaacctgcctcatacccgggaacagcccatcgaaagatggattaatgcccgatgttgtccctgcgccccctggcgctcggaccaaagattcatcggtatgggatgggaacgcgtccgattagctagacggcggggtaacggcccaccgtggcgacgatcggtaggggttctgagaggaaggtcccccacactggaactgagacacggtccagactcctatgggaggcagcagtaaggaatattggtcaatggtcgcaagactgaaccagccaagtagcgtgaaggatgactgccctatgggttgtaaacttcttttgcaggggaataaccggcgccacgggtggcgtcctgcatgtaccctgcgaataagc

SEQ ID NO: 9185 - DNA, 470 bp, unidentified
  misc_feature 1..470: note = Ascusbbf_598606, encodes 16S rRNA
  source 1..470: mol_type = genomic DNA
agagtttgatcatggctcagagtgaacgctggcggcatgcttaacacatgcaagtcgcacgggcagcaatgtcagtggcggacgggtgagtaacgcgtagggaagtgtccagaggtgggggacaaccccgggaaactggggctaataccgcatatgtcctgagggacaaagcagtgatgcgcctttggagttacctgcgtccgattagctagttggtggggtaaaggcctaccaaggcgacgatcggtagctggtctgagaggatgaccagccacactgggactgagacacagcccagactcctacgggaggcagcagtggggaatattggacaatgggcgcaagcctgatccagcaatgccgcgtgggtgaagaaggtcttcggatcgtaaagccctttcggcggggacgatgatgacggtacccgcagaagaagccccggctaacttcgtgccagcagccgcggtaat

SEQ ID NO: 9186 - DNA, 490 bp, unidentified
  misc_feature 1..490: note = Ascusbbf_539566, encodes 16S rRNA
  source 1..490: mol_type = genomic DNA
agagtttgatcatggctcaggataaacgctggcggcatgcctaatacatgcaagtcgaacggagttaccttcgggtaacttagtggcgaacgggtgagtaacacgtaggtaatccatcccaaggacgaggatagcttctggaaacggaaggtaaaactggatagttaattagagggcatcctctaattattaaaagagcaatctaccctgggaagagcctgcggcgcattagctagttggtgaggtaatggcccaccaaggcgatgatgcgtagccggactgagaggtcgaccggccacattgggactgagacacggcccagactcctacgggaggcagcagtagggaattttcggcaatgggcggaagcctgaccgagcaatgccgcgtgaatgatgaagtatttcggtatgtaaagttcttttaacagggacgaaaaaacaaattgacggtacctgttgaataagctccggctaactacgtgccagca

SEQ ID NO: 9187 - DNA, 490 bp, unidentified
  misc_feature 1..490: note = Ascusbbf_1509651, encodes 16S rRNA
  source 1..490: mol_type = genomic DNA
agagtttgatcatggctcagattgaacgctggcggcatgcctaacacatgcaagtcgaacggtaacgcggagagcttgctctctggcgacgagtggcggacgggtgagtaatacttaggaatctgcccattagtgggggacaactcggggaaactcgagctaataccgcatacgccctacgggggaaagcggaggactcttcggagcttcgcgctaatggatgagcctaagtcggattagcttgttggtggggtaaaggcctaccaaggcgacgatccgtagctggtctgagaggacgatcagccacactgggactgagacacggcccagacacctacgggaggcagcagtggggaatattggacaatgggggcaaccctgatccagcaatgccgcgtgtgtgaagaaggcctgcgggttgtaaagcactttcagtagagaagaaaagcctggcgttaataccgccgggtcttgacgtaacctacagaag

SEQ ID NO: 9188 - DNA, 490 bp, unidentified
  misc_feature 1..490: note = Ascusbbf_457699, encodes 16S rRNA
  source 1..490: mol_type = genomic DNA
agagtttgatcatggctcagaatgaacgctggcggcatggattaggcatgcaagtcgaacgccccggcttcggccggggagtggcgaaagggtgcgcaacgcgtggggaacccgcccccgggcccgggacaagcgctggaaacggcgtctgatacgggatgcggacccgcctggcatcgggcggcgtccaaagattcatcgcccggggagggccccgcgtcccattagctggatggcggggtgacggcccaccatggctacgacgggtaggtggtctgagaggatggtcacccacactgggactgagacactgcccagactcctgcgggaggctgcagtcgagaatcttccgcaatgggcgaaagcctgacggagcgatgccgcgtgagggacggaggccttcgggtcgtgaacctctgtcacccgggacgaatcaatgacggtaccgggagaggaagccacggctaactacgtgccagcagccgcggta

SEQ ID NO: 9189 - DNA, 490 bp, unidentified
  misc_feature 1..490: note = Ascusbbf_1680001, encodes 16S rRNA
  source 1..490: mol_type = genomic DNA
agagtttgatcatggctcaggatgaacgctagctacaggcttaacacatgcaagtcgaggggcagcatacttatagcaatataagtgatggcgaccggcgcacgggtgagtaacacgtatccaaccttccctttactcggggatagcctttcgaaagaaagattaatacccgatggcatatgacgatcacatgattgtcctattaaagaatttcggtaaaggatggggatgcgttccataggcagttggcggggtaacggcccaccaaacctacgatggataggggttctgagaggaaggtcccccacattggaactgagacacggtccaaactcctacgggaggcagcagtgaggaatattggtcaatgggcgcaggcctgaaccagccaagtagcgtgaaggatgactgccctatgggttgtaaacttcttttagaagggaataaagtggagtatgtatactcctttgtatgtaccttctgaataagg

SEQ ID NO: 9190 - DNA, 470 bp, unidentified
  misc_feature 1..470: note = Ascusbbf_1546993, encodes 16S rRNA
  source 1..470: mol_type = genomic DNA
agagtttgatcctggctcagaacgaacgctggcggcaggcttaacacatgcaagtcgagcgcactcttcggagtgagcggcagacgggtgagtaacgcatgggaatctacccatctctacggaataactcggggaaacccgtgctaataccgtatacgcccttcgggggaaagatttatcggagatggatgagcccgcgttggattagctagttggtggggtaaaggcctaccaaggcgacgatccatagctggtctgagaggatgatcagccacattgggactgagacacggcccaaactcctacaggaggcagcagtggggaatattggacaatgggcgaaagcctgatccagccatgccgcgtgagtgatgaaggccctagggttgtaaagctctttcaacggtgaagataatgacggtaaccgtagaagaagccccggctaacttcgtgccagcagccgcggtaat

SEQ ID NO: 9191 - DNA, 490 bp, unidentified
  misc_feature 1..490: note = Ascusbbf_884839, encodes 16S rRNA
  source 1..490: mol_type = genomic DNA
agagtttgatcctggctcaggatcaacgctggcggcgtgcctaatgcatgcaagtcgagcggggtgatcttcggatcacttacgcggcggacgggtgcggaacacgtgggcaacctgccccgaggtgggggatagccggtggaaacaccgggtaattccgcatacggtcactggctgaagggtcagtgaggaaaggctcgtaagagtcgccttgggaggggcctgcggccgattagctagacggtggggtaacggcctaccgtggcgatgatcggtagctggtctgagaggacggccagccacacggggactgagacacggccccgactcctacgggaggcagcagcaaggaatcttccgcaatgggcgaaagcctgacggagcaacgccgcgtgtgggatgacgcctttcggggtgtaaaccacttttctcagggaagaagcactgacggtacctgaggaagaaggaccggctaactacgtgccagcag

SEQ ID NO: 9192 - DNA, 490 bp, unidentified
  misc_feature 1..490: note = Ascusbbf_142751, encodes 16S rRNA
  source 1..490: mol_type = genomic DNA
agagtttgatcatggctcaggacaaacgctggcggcgtgcctcatacatgcaagtcgaacgagaaactctagcttgctagagtggaaagtggcggacgggtgagtaatgtgtaggaaatctgccctagagtgggggacaacagagggaaacttctgctaataccccatatgagcttggttggaataccaatcttgaaaactccggtgctctaggatgagcctgcatctgattagcttgttggcggtgtaattgaccaccaaggcgacgatcagtagctggtttgagaggatgatcagccacaatgggactgagacacggcccatactcctacgggaggcagcagtagggaattttgcgcaatgggcgaaagcctgacgcagcaacgccgcgtgtacgttaaacccctcggggcgtaaagtactgtcagtggggacgaattttgacggtacccacagaggaagcaccggctaactccgtgccagcagccgc

SEQ ID NO: 9193 - DNA, 490 bp, unidentified
  misc_feature 1..490: note = Ascusbbf_602276, encodes 16S rRNA
  source 1..490: mol_type = genomic DNA
agagtttgatcctggctcagattgaacgctggcggcaggcctaacacatgcaagtcgagcggtaacagaagaaagcttgctttcttgctgacgagcggcggacgggtgagtaatgtatggggatctgcccgatagagggggataactactggaaacggtggctaataccgcataatgtctacggaccaaagcaggggctcttcggaccttgcactatcggatgaacccatatgggattagctagtaggtggggtaaaggctcacctaggcgacgatctctagctggtctgagaggatgatcagccacactgggactgagacacggcccagactcctacgggaggcagcagtggggaatattgcacaatgggcgcaagcctgatgcagccatgccgcgtgtatgaagaaggccttagggttgtaaagtactttcagcggggaggaaggtgataaggttaatacccttatcaattgacgttacccgcagaag

SEQ ID NO: 9194 - DNA, 490 bp, unidentified
  misc_feature 1..490: note = Ascusbbf_131960, encodes 16S rRNA
  source 1..490: mol_type = genomic DNA
agagtttgatcctggctcaggatgaacgctagctacaggcttaacacatgcaagtcgcggggcatcatgacgatagcttgctattgttgatggcgaccggcgcacgggtgagtaacgcgtatccaacctgcccccaagtagggcacagcccggcgaaagtcggattaattccctatgtggtcatgttatggcatcagtatatgactaaaggctttggttgcttggggttggggatgcgtaggattagctagacggcgggttgacagcccaccgtggcgacgatccttaggggttctgagaggaaggtcccccacactggtactgagacacggaccagactcctacgggaggcagcagtgaggaatattggtcaatgggcggaagcctgaaccagccaagtagcgtgcaggatgacggccctatgggttgtaaactgcttttatgcggggataaagtgtgccacgtgtggcatattgcaggtaccgcatga

SEQ ID NO: 9195 - DNA, 490 bp, unidentified
  misc_feature 1..490: note = Ascusbbf_651116, encodes 16S rRNA
  source 1..490: mol_type = genomic DNA
agagtttgatcatggctcaggacgaacgctggcggcgtgcttcaaacatgcaagtcgaacgagatatgagggagcttgctcccaagtatctagtggcggacgggtgagtaacgcgtgaacaatctggcttacacagggggataacacttggaaacgagtgctaataccgcatatgaccacagcctggcatcaggtaggggtgaaaggagaaatccggtgaaagatgagtttgcgtttcattagctagttggtgaaggtaacggcccaccaaggcgacgatgaatagccgatctgagaggatgaacggccacactggaattgagagacggtccagactcctacgggaggcagcagttaggaatattgggcaatggaggaaactctgacccagcaacgccgcgtgaaggaagaaggttttcggattgtaaacttctgatctgtgggaagaaggaaatgacggtaccacaggagaaagccacggctaactacg

SEQ ID NO: 9196 - DNA, 490 bp, unidentified
  misc_feature 1..490: note = Ascusbbf_139820, encodes 16S rRNA
  source 1..490: mol_type = genomic DNA
agagtttgatcctggctcaggacgaacgctggcggcgtgcttaacacatgcaagtcgagcggtaaggccctttcgggggtacacgagcggcgaacgggtgagtaacacgtgggtgacctgccctcagctctgggataagcccgggaaactgggtctaataccggataggacacatcggcgcatgttggtgtgtggaaagattcggttcggctggggatgggcccgcggcctatcagcttgttggtggggtgatggcctaccaaggcggtgacgggtagccggcctgagagggcgaccggccacactgggactgagacacggcccagactcctacgggaggcagcagtggggaatattgcgcaatgggcggaagcctgacgcagcgacgccgcgtgggggatgacggccttcgggttgtaaacctctttcgccagggacgaagcttttgtgacggtacctggataagaagcaccggccaactacgtgccag

SEQ ID NO: 9197 - DNA, 490 bp, unidentified
  misc_feature 1..490: note = Ascusbbf_1606156, encodes 16S rRNA
  source 1..490: mol_type = genomic DNA
agagtttgatcatggctcagattgaacgctggcggcaggcctaacacatgcaagtcgaacgggaactctgagatgagacttcggtggattttcagaaattctagtggcggacgggtgagtaacgcgtgggtaacctgcccttaagaggcggataacattgagaaatcagtgctaatacgccatatgcttacgaagtcgcatgactttgtgaggaaatgagattcgcttaaggatggacccgcgtttgattagccagttggcagggtaacggcctaccaaagcaacgatcaatagccggcctgagagggtgaacggccacattggaactgagacacggtccaaactcctacgcgaggcagcagtggggagtattgcacaatgggcgaaagcctgatgcagcaacgccgcgtgagtgaagaagtatttcggtatgtaaagctctatcgatggggaataagatgaaggtacccaagtaagaagccccggctaa

SEQ ID NO: 9198 - DNA, 482 bp, unidentified
  misc_feature 1..482: note = Ascusbbf_1605979, encodes 16S rRNA
  source 1..482: mol_type = genomic DNA
agagtttgatcatggctcagaacgaacgctggcggcacgcctaacacatgcaagtcggacggtatggatagcttgctattcatatagtggcggactggtgagtaatatgtaggaatctgcccataggttagggatagcaccgggaaactggtggtaatacctgatgatctggagacaggaaaggaggaattcgccgatggaggagcctatatctgattagatagttggaggtgtaagagaccaccaagtcgatgatcggtagctgttctgagaggaagatcagccacattgggactgagatacggcccaaactcctacgggaggcagcagtggggaatattggacaatggaggaaactctgatccagcgatgccgcgtgagtgaagaaggccctagggttgtaaagctcttttgtcagggacgatgatgacggtaccttgtgagaaagccacggctaactacgtgccagcagccgcggtaat

SEQ ID NO: 9199 - DNA, 490 bp, unidentified
  misc_feature 1..490: note = Ascusbbf_1490591, encodes 16S rRNA
  source 1..490: mol_type = genomic DNA
agagtttgatcctggctcaggatgaacgctggcggcgtgcttaacacatgcaagtcgaacgaagcacttcataaagcttgctttaagaagtgacttagtggcggacgggtgagtaacgcgtgggtaacctgccttacacagggggataacagttagaaatgactgctaataccgcataaaacagcagagtcgcatgacacaactgtcaaagatttatcggtgtaagatggacccgcgtctgattagctagttggtggggtaacggcctaccaaggcgacgatcagtagccggcctgagagggtgaacggccacattgggactgagacacggcccaaactcctacgggaggcagcagtggggaatattggacaatgggcgaaagcctgatccagcgacgccgcgtgagcgaagaagtatttcggtatgtaaagctctatcagcagggaagaaaacgacggtacctgactaagaagccccggctaactacgt

SEQ ID NO: 9200 - DNA, 490 bp, unidentified
  misc_feature 1..490: note = Ascusbbf_541219, encodes 16S rRNA
  source 1..490: mol_type = genomic DNA
agagtttgatcatggctcaggatgaacgctagctacaggcttaacacatgcaagtcgtggggcagcatgaacttagcttgctaagtttgatggcgaccggcgcacgggtgagtaacgcgtatccaaccttccccctggtagggcatagcccggcgaaagtcggattaataccctatgttttcccttgacggcatccgacggggaacaaagatttatcgccatgggatggggatgcgtccgattaggtagacggcggggtgacggcccaccgtgccttcgatcggtaggggttctgagaggaaggtcccccacactggaactgagacacggtccagactcctacgggaggcagcagtgaggaatattggtcaatgggcggaagcctgaaccagccaagtagcgtgcaggatgacggccctacgggttgtaaactgcttttggaggggaataaagtgcgggacgagtcctgctttgcatgtaccctcagaat

SEQ ID NO: 9201 - DNA, 490 bp, unidentified
  misc_feature 1..490: note = Ascusbbf_629658, encodes 16S rRNA
  source 1..490: mol_type = genomic DNA
agagtttgatcctggctcaggatgaacgctggcggcgtgcctaacacatgcaagtcgaacggaaaggattcttcggaattctttcagtggcggacgggtgagtaacgcgtgggtaacctgccccatacaggggaacaacagctggaaacggctgctaataccgcataagcgcacagtgctgcatggtacagtgtgaaaagattttatcggtatgggatggacccgcgtctgattagctagttggaggggtaacggcccaccaaggcgacgatcagtagccgacctgagagggtgaccggccacattggaactgagacacggtccaaactcctacgggaggcagcagtgaggaatattggtcaatgggcggaagcctgaaccagccaagtagcgtgcaggaagacggccctatgggttgtaaactgcttttgtacaggaataaagtgacccacgtgtgggtttttgcatgtaccgtaagaataaggaccgg

SEQ ID NO: 9202 - DNA, 488 bp, unidentified
  misc_feature 1..488: note = Ascusbbf_522234, encodes 16S rRNA
  source 1..488: mol_type = genomic DNA
agagtttgatcctggctcagaacgaacgctggcggcaggtttaaaacatgcaagtcgaacggtaacattaaggagcttgcttcttagatgacgagtggcgcacgggtgagtaaagtataggaacctatcttagagtcggggataacgccgggaaactggtgctaataccggatgatgccttagggttaaagatttatcgcttttagaggggcctatatctgattaggtagttggtgtggtaaaggcataccaagccgatgatcggtagctggtctgagaggatgatcagccacattgggactgagacacggcccaaactcctacgggaggcagcagttgggaatattggacaatgggggcaaccctgatccagccatgccgcgtgagtgaagaaggccttcgggttgtaaaactcttttatagggggcgatgatgacggtaccctatgaataagcaccggctaacttcgtgccagcagccgcggtaat

SEQ ID NO: 9203 - DNA, 490 bp, unidentified
  misc_feature 1..490: note = Ascusbbf_326167, encodes 16S rRNA
  source 1..490: mol_type = genomic DNA
agagtttgatcatggctcaggacgaacgctggcggcgtgcttcatacatgcaagtcgaacgagaattggtagcttgctaccaaggaaagtggcggacgggtgagtaaaatgtagagaatctgccctagagtgagggatagcagttggaaacgactattaatacctcatatgagattatttgcgatagtaatcttgaaaactccggtgctctgggatgagtctgcatctgattagctagttggtggtgtaatggacccccaaggcgacgatcagtagctggtttgagaggatgatcagccacaatgggactgagacacggcccatactcctacgggaggcagcagtagggaattttgcgcaatgggcgaaagcctgacgcagcaacgccgcgtgaacgaagaaggtcttcggattgtaaagttctgtcagcagggacgaaagatgactgtacctgcagaggaagcaccggctaactccgtgccagcagccg

SEQ ID NO: 9204 - DNA, 490 bp, unidentified
  misc_feature 1..490: note = Ascusbbf_407179, encodes 16S rRNA
  source 1..490: mol_type = genomic DNA
agagtttgatcctggctcagaacgaacgctggcggcaggcttaacacatgcaagtcgagcgccccgcaaggggagcggcagacgggtgagtaacgcgtgggattctacccatctctacggaataactcagggaaacttgtgctaataccgtatacgcccttcgggggaaagatttatcggagatggatgagcccgcgttggattagctagttggtggggtaatggcctaccaaggcgacgatccatagctggtctgagaggatgatcagccacactgggactgagacacggcccagactcctacgggaggcagcagtggggaatcttccgcaatgggcgaaagcctgacggagcaacgccgcgtgagtgaagaaggccttcgggtcgtaaagctctgttgtcggggacgaatgtagcgcttatcaacaacgagtgctaatgacggtacctgacgaggaagccacggctaactacgtgccagcagccgcgg

SEQ ID NO: 9205 - DNA, 490 bp, unidentified
  misc_feature 1..490: note = Ascusbbf_660844, encodes 16S rRNA
  source 1..490: mol_type = genomic DNA
agagtttgatcatggctcaggacgaacgctggcggcgtgcttaacacatgcaagtcgagcggtaaggcccttcggggtacacgagcggcgaacgggtgagtaacacgtgagtaatctgcccttcacttcgggataaccaccggaaacggtggctaataccggatatgaaactcttgcgcatgcttgggtttggaaagttccggcggtggaggatgtgctcgcggcctatcagcttgttggtgaggtaacggctcaccaaggcttcgacgggtagccggcctgagagggtgaccggccacactgggactgagacacggcccagactcctacgggaggcagcagtggggaatattggacaatgggcgaaagcctgatccagcaacgccgcgtgagggatgactgccttcgggttgtaaacctctttcagtaccgacgaagcgaaagtaacggtaggtacagaagaagcaccggccaactacgtgccagcagc

SEQ ID NO: 9206 - DNA, 490 bp, unidentified
  misc_feature 1..490: note = Ascusbbf_1097882, encodes 16S rRNA
  source 1..490: mol_type = genomic DNA
agagtttgatcctggctcaggatgaacgctggcggcgtgcctaacacatgcaagtcgaacggttaagccggcttcggccgggtataaagtggcgaacgggtgagtaacacgtgaccaacctgccccgcgcaccgggacagcctcgtgaaaacgggattgataccggatactccgggaggggggcatcccccccccgggaaagctccggcggcgcgggatggggtcgcggcccatcaggtagtgggcggggtagcggcccgcccagccgacgacgggtagccgggttgagagaccgaccggccacattgggactgagatacggcccagactcctacgggaggcagcagtggggaatattgcgcaatgggcgaaagcctgacgcagcaacgccgcgtgcgggacgaaggccctcgggttgtaaaccgctttcagcagggaagaccacgacggtacctgcagaagaagccccggctaactacgtgccagcagc

SEQ ID NO: 9207 - DNA, 490 bp, unidentified
  misc_feature 1..490: note = Ascusbbf_600214, encodes 16S rRNA
  source 1..490: mol_type = genomic DNA
agagtttgatcctggctcaggacgaacgctggcggcgtgcttcatacatgcaagtcgaacgagaagttaccttcgggtaatggacagtggcggacgggtgagtaaaatgtagagaatctgcccttgagatggggacaacagttggaaacgactgctaatacccaatatgcgcgtagttgagatactattcgtgaaaactccggtgctcagggatgagtctgcatctgattagcttgctggcggggtaacggcccaccagggcgacgatcagtaggggttctgagaggaaggtcccccacattggaactgagacacggtccaaactcctacgggaggcagcagtgaggaatattggtcaatggacgagagtctgaaccagccaagtagcgtgcaggatgacggccctatgggttgtaaactgcttttatacggggataaagtgcgccacgcgtggtgtattgcaggtaccgcaagaataaggaccggctaa

SEQ ID NO: 9208 - DNA, 488 bp, unidentified
  misc_feature 1..488: note = Ascusbbf_1697671, encodes 16S rRNA
  source 1..488: mol_type = genomic DNA
agagtttgatcatggctcagaacgaacgctggcggcaggcttaacacatgcaagtcgagcgccccgcaaggggagcggcagacgggtgagtaacgcgtgggaatctacccatctctacggaataactcagggaaacttgtgctaataccgtatacgcccttcgggggaaagatttatcggagatggatgagcccgcgttggattagctagttggtgaggtaaaggctcaccaaggcgacgatccatagctggtctgagaggatgatcagccacactgggactgagacacggcccagactcctacgggaggcagcagtggggaatattggtcaatgggcgggagcctgaaccagccaagtcgcgtgagggaggaaggtcctacggattgtaaacctctttagccggggagcaacgtgcgccacgcgtggcgcagtgagagtacccggagaataagcatcggctaactccgtgccagcagccgcggtaat

SEQ ID NO: 9209 - DNA, 490 bp, unidentified
  misc_feature 1..490: note = Ascusbbf_777820, encodes 16S rRNA
  source 1..490: mol_type = genomic DNA
agagtttgatcatggctcaggatgaacgctggcggcgtgcctaacacatgcaagtcggacgaagcgcccggagcggacatttcggtggaagggaagggacgactgagtggcggacgggtgagtaacgcgtggacgacctggcccatacagggggatagcagctggaaacggctggtaataccgcatgagcgcacgggcatgcatgtgcctgtgtgaaaagatttatcggtatgggatgggtccgcgtccgattagccagttggcggggtaacggcccaccaaagcgacgatcggtagccggcctgagagggcggacggccacattgggactgagacacggccctgactcctacgggaggcagcagtgggggatattgcacaatggggggaaccctgatgcagcgacgccgcgtgggtgaaggagcacctcggtgcgtaaagccctatcggcagggaagagagaggacggtacctgcagaagaagccccgg

SEQ ID NO: 9210 - DNA, 490 bp, unidentified
  misc_feature 1..490: note = Ascusbbf_534553, encodes 16S rRNA
  source 1..490: mol_type = genomic DNA
agagtttgatcatggctcaggacgaacgctggcggcgtgcttaagacatgcaagtcgagcggagagatgttgaaagcttgcttttgacggatcttagcggcggacgggtgagtaacgcgtgagcaacctgccttatacatcgggataacacttagaaataggtgctaataccggatatgaccacaaccgggcatccggaaggggtgaaagggtttactggtataagaggggctcgcgtctgattagctagttggtgaggtaacggcccaccaaggcaacgatcagtagccgacctgagagggtgatcggccacaatggaactgagatacggtccatactcctacgggaggcagcagtcgggaatattgggcaatggaggaaactctgacccagcaacgccgcgtggaggatgaaggtcttcggattgtaaacttctgttcttggggaagaaacaaatgactgtacccaaggagcaagccccggctaacta

SEQ ID NO: 9211 - DNA, 490 bp, unidentified
  misc_feature 1..490: note = Ascusbbf_715305, encodes 16S rRNA
  source 1..490: mol_type = genomic DNA
agagtttgatcctggctcaggatgaacgctagcggcaggcctaatacatgcaagtcgaacgggattgtccagcttgctgggcatgagagtggcgaatgggtgcgtaacgcgtgagcaacctacccttgtctgggggatagcccggagaaatccggattaataccgcataacgtcgatgagcggcattgcttatcgaccaaacatttatgggacatggatgggctcgcgtgacattagttagttggtagggtaacggcctaccaagaccgcgatgtctaggggatctgagaggatgaccccccacactggtactgagacacggaccagactcctacgggaggcagcagtaaggaatattggtcaatggagggaactctgaaccagccatgccgcgtgcaggacgactgccctacgggttgtaaactgcttttatacgggaataaaccccgctacgtgtagcgggctgaatgtactgtaagaataaggatcg

SEQ ID NO: 9212 - DNA, 490 bp, unidentified
  misc_feature 1..490: note = Ascusbbf_549358, encodes 16S rRNA
  source 1..490: mol_type = genomic DNA
agagtttgatcctggctcagaataaacgctggcggcgtgcttaacacatgcaagtcgagcgagaaaggtcttcggactgagtaaagcggcaaacgggtgagtaatgcgtgagaatctgccttttagtggagaatacctttaagaaattgaagttaatactgcataagccctacgggggaaagatggcctctttgctgtcgctaaaagatgagcttgcgtgccattagctagttggtagggtaaaggcctaccaaggcgatgatggctagccggcctgagagggtgtacggccacactggaactgagatacggtccagactcctacgggaggcagcagtgaggaatcttgcgcaatgggcgaaagcctgacgcagcgacgccgcgtggaggatgaaggccctagggtcgtaaacttctgttaaatggaaagaaatgtcctactctaatacagtgggaagatgacggtaccattagagaaagcaccggctaa

SEQ ID NO: 9213 - DNA, 490 bp, unidentified
  misc_feature 1..490: note = Ascusbbf_672929, encodes 16S rRNA
  source 1..490: mol_type = genomic DNA
agagtttgatcatggctcagaacgaacgctggcggcaggcttaacacatgcaagtcgagcgatcccttcggggatagcggcggacgggtgagtaacgcgtgggaacgtgcccttttcttcggaatagcccagggaaacttggattaataccggatacgcccttcgggggaaagatttatcggaaaaggatcggcccgcgttggattaggtagttggtggggtaacggcctaccaagccgacgatccatagctggtttgagaggatgatcagccacactgggactgagacacggcccagactcctacgggaggcagcagtgaggaatattggtcaatggacgagagtctgaaccagccaagtagcgtgcaggatgacggccctatgggttgtaaactgcttttatatagggataaagtgatctacatgtagatttttgtaggtactatatgaataaggaccggctaattccgtgccagcagccgcggtaat

SEQ ID NO: 9214 - DNA, 490 bp, unidentified
  misc_feature 1..490: note = Ascusbbf_5191, encodes 16S rRNA
  source 1..490: mol_type = genomic DNA
agagtttgatcatggctcaggatgaacgctggcggcgtgcctaacacatgcaagttgaacgaagcaatcaagacagaatccttcgggaggaagatttgattgactgagtggcggacgggtgagtaacgcgtgggtaacctgccttgtacagggggataacagttagaaatgactgctaataccgcataagcgcacagtactgcatggtacagtgtgaaaaactccggtggtacaagatggacccgcgtctgattagccagttggcagggtaacggcctaccaaagcaacgatcagtagccgacttgagagagtgatcggccacattgggactgagacacggcccagactcctacgggaggcagcagtgggggatattgcacaatggaggaaactctgatgcagcaacgccgcgtgagtgatgaagtagttcgctacgtaaagctctatcagtagggaagataatgacggtacctacacaagaagctccgg

SEQ ID NO: 9215 - DNA, 490 bp, unidentified
  misc_feature 1..490: note = Ascusbbf_1373197, encodes 16S rRNA
  source 1..490: mol_type = genomic DNA
ctcgtttgatcctggctcaggatgaacgctagcggcaggcttaacacatgcaagtcgaggggtaacgcggggtagcaatactctggcgacgaccggcgcacgggtgcgtaacgcgtatgcaacctacctgtaacaggggtataacggagagaaatttccactaatcccccatattgttattctttcgcatgttaggataacgaaagcttcggtggttacggatgggcatgcgtgtcattagctagttggtaaggtaacggcttaccaaggcgacgatgtctaggggagctgggaggcttatccccaaagcgggtactgagacacggaccagactcctacggggggcagcagtgaggaatattggtcaatggacggaagactgaaccagccatgccgcgtggaggaagaaggtcctatgggttgtaaactccttttgttcgagagtaataagggctttgcgaagcccgatgagagtatcggacgaataagc

SEQ ID NO: 9216 - DNA, 490 bp, unidentified
  misc_feature 1..490: note = Ascusbbf_102213, encodes 16S rRNA
  source 1..490: mol_type = genomic DNA
agagtttgatcctggctcaggatgaacgctggcggcgtgcctaatacatgcaagtcgaacgcgagcagcaatgctcgagtggcgaacgggtgagtaatacataagtaacctgccctagacagggggataactgctggaaacggcagctaagaccgcataggtatggacactgcatggtgaccatattaaaagtgccaaggcactggtagaggatggacttatggcgcattagctggttggtgaggtaacggctcaccaaggcgacgatgcgtagccgacctgagagggtgaccggccacactgggactgagacacggcccagactcctacgggaggcagcagtagggaattttcggcaatggggggaaccctgaccgagcaacgccgcgtgaaggaagaaggaattcgttctgtaaacttctgttataaaggaagaacggcggatatagggaatgatatccgagtgacggtactttatgagaaagccacg

SEQ ID NO: 9217 - DNA, 490 bp, unidentified
  misc_feature 1..490: note = Ascusbbf_93841, encodes 16S rRNA
  source 1..490: mol_type = genomic DNA
agagtttgatcatggctcagattgaacgctggcggcaggcttaacacatgcaagtcggacggggtgaatggtgcttgcaccatttacttagtggcgaacgggtgagtaatgcttaggaatctggctattaatgggggacaacaattcgaaaggattgctaataccgcatacgccctacgggggaaagcaggggatcttcggaccttgcgttaatagatgagcctaagttggattagctagttggtggggtaaaggcctaccaaggcgacgatccatagcgggtctgagaggatgatccgccacactgggactgagacacggcccagactcctacgggaggcagcagtggggaatattggacaatgggcgcaagcctgatccagccatgccgcgtgtgtgaagaaggtcgtaagattgtaaagcactttaagcggggaggagagtactgatgttaataccatcaagtattggacgctacccgcagaataag

SEQ ID NO: 9218 - DNA, 490 bp, unidentified
  misc_feature 1..490: note = Ascusbbf_287126, encodes 16S rRNA
  source 1..490: mol_type = genomic DNA
agagtttgatcctggctcaggatgaacgctggcggcgtgcttaacacatgcaagtcgaacggagatgcgtgaaagaagttttcggacggaaattgcacatcttagtggcggacgggtgagtaacacgtaaacaatctgccttcaagagcgggacaacagatagaaatatttgctaataccgcataagaccacaatgtcgcatgacataggggtaaaagggagcaattcgcttgaagatgagtttgcggactattagctagttggtgaggtaacggctcaccaaggcaaagatggttagccgacctgagagggtgatcggccacactggaactgagatacggtccagactcctacgggaggcagcagtgaggaatattgggcaatggaggcaactctgacccagcaacgccgcgtgaaggaagaaggttttaggattgtaaacttctgttataggggaaaaagaaagtgatggtaccctatgagcaagcta

SEQ ID NO: 9219 - DNA, 490 bp, unidentified
  misc_feature 1..490: note = Ascusbbf_259052, encodes 16S rRNA
  source 1..490: mol_type = genomic DNA
agagtttgatcctggctcaggacgaacgctggcggcgcgcctaacacatgcaagtcgaacggagctattttgatcgaacccttcggggtgacattggcttagcttagtggcgaacgggtgagtaacacgtgaggaacctgcccttcagagggggacaacagttggaaacgactgctaataccgcataagaccacagagccgcatggctcaggggtcaaaggagaaatccgctgaaggatggcctcgcgtccgattaggtagttggcggggtaacggcccaccaagccgacgatcggtagccggactgagaggttgaacggccacattgggactgagacacggcccagactcctacgggaggcagcagtggggaatattgcacaatgggggaaaccctgatgcagcgacgccgcgtgagggaagaagattttcggattgtaaacctctgtcttcggggacgataatgacggtacccgaggaggaagccacg

SEQ ID NO: 9220 - DNA, 490 bp, unidentified
  misc_feature 1..490: note = Ascusbbf_214068, encodes 16S rRNA
  source 1..490: mol_type = genomic DNA
agagtttgatcatggctcaggatgaacgctggcggcgtgcctaatacatgcaagtcgaacgaacttcttcggaagttagtggcgaacgggtgagtaacacgtaggtaatctaccctagagacggggataacgattggaaacgatcgctaataccggatagtatataagatcgcatggttttatatttaaagttgggatacaacactgtaggatgagcctgcggcgcattagttagttggcgggataaaagcccaccaagacgatgatgcgtagccggactgagaggttgaacggccacattgggactgagacacggcccagactcctacgggaggcagcagtagggaattttcggcaatgggggaaaccctgaccgagcaacgccgcgtgaatgcagaagtatttcggtatgtaaaattcttttttagaggaagaacgatactagtagggaatgactagtaagtgacggtactttaagaataagccccgg

SEQ ID NO: 9221 - DNA, 490 bp, unidentified
  misc_feature 1..490: note = Ascusbbf_91415, encodes 16S rRNA
  source 1..490: mol_type = genomic DNA
agagtttgatcatggctcaggataaacgctggcggcgcgcataacacatgcaagtcggacgaaagatttggtttcggtcaaagctttagtggcggacgggtgagtaacacgtagataacttgtctcatagagggggatagccggaagaagttccgattaataccgcataatacatctctatcgcatgatggagatggtaaacgaattaaatcgctatgagagaggtctgcggctgattagctagttggagtggtaacggcacaccaaggcgacgatcagtagccggtttgagagaatgtacggccacattgggactgagatacggcccagactcctacgggaggcagcagtggggaatattgcgcaatgggggaaaccctgacgcagcgacgccgtgtaagggatgaaggtcttcggatcgtaaacctatatcgactgtgaaaagcaaggatggtagcagagtaagaagccccggctaactacgtgccag

SEQ ID NO: 9222 - DNA, 490 bp, unidentified
  misc_feature 1..490: note = Ascusbbf_202925, encodes 16S rRNA
  source 1..490: mol_type = genomic DNA
agagtttgatcatggctcaggatgaacgctggcggcgtgcttaacacatgcaagtcgagcgaaggacaaagagcttgctctttgttacttagcggcggacgggtgagtaacgtgtgggcaatctgccctatgcagaggaataacatagagaaatttatgctaatgcctcataaactcttagtactgcatggtacatagagaaaagatttatcggcataggaggagcccgcatctgattagatagttggtggggtaacggcctaccaagtcaacgatcagtagccgacctgagagggtgatcggccacattggaactgagacacggtccaaactcctacgggaggcagcagtggggaatattgcacaatgggggaaaccctgatgcagcaacgccgcgtgaaggaagaagtatttcggtatgtaaacttctatcgacagggaagaaagaaatgacggtacctgaataagaagccccggctaaatacgtgcc

SEQ ID NO: 9223 - DNA, 490 bp, unidentified
  misc_feature 1..490: note = Ascusbbf_1269609, encodes 16S rRNA
  source 1..490: mol_type = genomic DNA
agagtttgatcctggctcaggatgaacgctagcgacaggcttaacacatgcaagtcgaggggcagcgcggaggtggcgacacttttggcggcgaccggcggactggtgagtaacacgtatgcgacctgccccccaccggggaatagaccagggaaacttggcgtaatgccccatgagccgcgctcctgcatgggggagcggtgaaagtttcattgcggtgagggatgggcatgcggcgcattagctagttggcggggtaacggcccaccaaggccacgatgcgtaggggttctgagaggaaggtcccccacactggtactgagacacggaccagactcctacgggaggcagcagtgaggaatattggtcaatgggcggaagcctgaaccagccaagtcgcgtgggggatgaaggccctagttggttgtaaacccctttaggcggggagtaacccggcggacgcgtccgccgttgagagtacccgcagaat

SEQ ID NO: 9224 - DNA, 490 bp, unidentified
  misc_feature 1..490: note = Ascusbbf_909268, encodes 16S rRNA
  source 1..490: mol_type = genomic DNA
agagtttgatcatggctcagattgaacgctggcggcaggcctaacacatgcaagtcgaacggtaacaggaagaagcttgcttctttgctgacgagtggcggacgggtgagtaatgtctgggaaactgcctgatggagggggataactactggaaacggtagctaataccgcataacgtcgcaagaccaaagagggggaccttcgggcctcttgccatcggatgtgcccagatgggattagctagttggtgagataacagcccaccaaggcgacgatcagtagccgacctgagagggtgatcggccacattgggactgagacacggcccaaactcctacgggaggcagcagtggggaatattgcacaatgggcgaaagcctgatgcagcaacgccgcgtgaaggatgaagggtttcggctcgtaaacttctatcaatagggaagaaagaaatgacggtacctaaataagaagccccggctaactacgtgcc

SEQ ID NO: 9225 - DNA, 490 bp, unidentified
  misc_feature 1..490: note = Ascusbbf_1438867, encodes 16S rRNA
  source 1..490: mol_type = genomic DNA
agagtttgatccctggctcaggatgaacgctagcggcaggcttaacacatgcaagtcgaggggtaacagggagtagcaatactctgctgacgaccggcgcacgggtgcgtaacgcgtatgcaacctacctgtaacaggggaataacggagagaaatttccactaatgccccatatggttaaagattcgcatgtttctttaacgaaagctttttgtggttacggatgggcatgcgtgacattaggtagttggtggggcaacggcccaccaagccgacgatgtctaggggagctgagaggctagacccccacactggtactgagacacggaccagactcctacgggaggcagcagtgaggaatattggtcaatgggcggaagcctgaaccagccatgccgcgtgcgggaggaaggccctatgggttgtaaaccgcttttgctccggagtaataagtcccatgcgtggggcgatgagagtacggggcgaataa

SEQ ID NO: 9226 - DNA, 490 bp, unidentified
  misc_feature 1..490: note = Ascusbbf_1011548, encodes 16S rRNA
  source 1..490: mol_type = genomic DNA
agagtttgatcatggctcaggacgaacgctggcggcgtgcttaacacatgcaagtcgaacgggactgcccgaatgaagttttcggatggatttttggtatgtttagtggcgaacgggtgagtaacgcgtgagtaacctgccttggagagggggacaacagccggaaacggctgctaataccgcatgacgtcacgggagggcatccttctgtgaccaaagatttatcgctctgagatggactcgcgtccgattagatagttggtgaggtaacggctcaccaagtcgacgatcggtagccggactgagaggttgaacggccacattgggactgagatacggcccagactcctacgggaggcagcagtgaggaatattgggcaatgggcgcaagcctgacccagcaacgccgcgtgaaggaagaaggttttcggattgtaaacttcttttcttcgggacgaaaaatgacggtaccgaaggaataagccacggc

SEQ ID NO: 9227 - DNA, 490 bp, unidentified
  misc_feature 1..490: note = Ascusbbf_703530, encodes 16S rRNA
  source 1..490: mol_type = genomic DNA
agagtttgatcctggctcaggatgaacgctggcggcgtgcctaatacatgcaagtcgaacggagcacttcggtgcttagtggcgaacgggtgagtaacacgtaggtaacatatctatacgacgaggataacggctggaaacggctgctaagactggataggaatataaggggcatccctaatattttaaaagactttggtatgcgtataggatggcctgcggcgcattagctagttggtggggtaatagcctaccaaggcaatgatgcgtagccggactgagaggttgaccggccacattgggactgagacacggcccagactcctacgggaggcagcagtagggaattttcggcaatggggggaaccctgaccgagcaacgccgcgtgaatgaagaagtacttaggtatgtaaagttcttttattggggaagaaaggctagagcaatctagattgacggtacccattgaataagccccggctaactatg

SEQ ID NO: 9228 - DNA, 490 bp, unidentified
  misc_feature 1..490: note = Ascusbbf_381721, encodes 16S rRNA
  source 1..490: mol_type = genomic DNA
agagtttgatcctggctcaggatgaacgctggcggcgtgcttaacacatgcaggtcgaacgaagctccaatctcctattcttcggaagaaagagagaggaagacttagtggcggacgggtgagtaacgcgtggggaacctgcccgaaagagggggacaacagttggaaacgactgctaataccgcataagccggcgggaccgcatggtccagccggaaaaggagcaatccgctttcggatggccccgcgtctgattagccggttggcggggtaacggcccaccaaagcgatgatcagtagccggactgagaggttgaacggccacattgggactgagacacggcccaaactcctacgggaggcagcagtggggaatattgcacaatggaggaaactctgatgcagcgacgccgcgtgagtgaagaagtgtttcggcatgtaaagctctatcagcagggaagaaaatgacggtacctgcacaagaagcccc

SEQ ID NO: 9229 - DNA, 490 bp, unidentified
  misc_feature 1..490: note = Ascusbbf_347590, encodes 16S rRNA
  source 1..490: mol_type = genomic DNA
agagtttgatcctggctcaggatgaacgctggcggcgtgcctaatacatgcaagtcgaacgaagcatcttcggatgcttagtggcgaacgggtgagtaacacgtagataacctacctttaactcgaggataactccgggaaactggagctaatactggataggatgtgtgcatgaaaaaaacacatttaaagatttatcggtttaagaggggtctgcggcgcattagttagttggtggggtaagagcctaccaagacgatgatgcgtagccggactgagaggtctaccggccacattgggactgagaacggcccaaactcctacgggaggcagcagtagggaattttcggcaatgggggaaaccctgaccgagcaacgccgcgtgaacgacgaagtacttcggtatgtaaagttcttttatatgggaagaaaaattaaaaattgacggtaccatatgaataagccccggctaactatgtgccagcagccg

SEQ ID NO: 9230 - DNA, 490 bp, unidentified
  misc_feature 1..490: note = Ascusbbf_1679221, encodes 16S rRNA
  source 1..490: mol_type = genomic DNA
agagtttgatcatggctcaggacgaacgctggcggcgtgcctaatacatgcaagtcgagcggacgaattttcggtgcttgcaccgaattttcgttagcggcggacgggtgagtaacacgtgggtaacctaccttatagattgggataactccgggaaaccggggctaataccgaataatactttttaacacatgtttgaaagttgaaagacggttttgctgtcactataagatggacccgcggcgcattagctagttggtgaggtaacggctcaccaaggcaacgatgcgtagccgacctgagagggtgatcggccacactgggactgagacacggcccagactcctacgggaggcagcagtagggaatcttccacaatggacgaaagtctgatggagcaacgccgcgtgagtgaagaaggatttcggttcgtaaaactctgttgcaagggaagaacaagtagcgtagtaactggcgctaccttgacggt

SEQ ID NO: 9231 - DNA, 490 bp, unidentified
  misc_feature 1..490: note = Ascusbbf_423602, encodes 16S rRNA
  source 1..490: mol_type = genomic DNA
agagtttgatcctggctcagaacgaacgctggcggcgcgcctaacacatgcaagtcgagcgattaagacccttcggggtgaataaagcggcggacgggtgagtaaggcatagataacctgcctcgaagagggggatagcctggggaaacttgggttaataccgcgtaagctggatgagtgaatgtcattcagtaaaggcttcggccgctttgagatgggtctatgtatgattagctagttggagtggtaatggcaccccaaggcaacgatcattaactggtctgagaggatgatcagtcacactggaactgagacacggtccagactcctacgggaggcagcagtgaggaattttgcgcaatgggcgaaagcctgacgcagcgacgccgcgtggaggatgaagtctttcgagatgtaaacttctgtcagtagggatgataatgacagtacctacagaggaagcaccggctaactccgtgccagcagccgc

SEQ ID NO: 9232 - DNA, 490 bp, unidentified
  misc_feature 1..490: note = Ascusbbf_496514, encodes 16S rRNA
  source 1..490: mol_type = genomic DNA
agagtttgatcatggctcagaatgaacgctggcggcgtggttaagacatgcaagtcggacggtgtttagggtgtagcaatacacgttaaacgcagtggcgaacgggtgcgtaacacgtgaacaatctacctccgagtggggaatagctcgccgaaaggcgaattaataccgcatacgatggttgctctcctgagtaatcaatcaaagccggggacctgcaagggcctggcgctgggagaggagttcgcggcctatcagctagttggcgaggtaacggctcaccaaggcaaagacgggtagctggtctgagaggatgatcagccacactggaactgagacacggtccagacacctacgggtggcagcagtttcgaatcattcacaatgggcgcaagcctgatggtgcgacgccgcgtgggggatgaaggtcttcggattgtaaacccctgtcactagggaagaaacgctatggattaacagtctgtagcct

SEQ ID NO: 9233 - DNA, 490 bp, unidentified
  misc_feature 1..490: note = Ascusbbf_674384, encodes 16S rRNA
  source 1..490: mol_type = genomic DNA
agagtttgatcatggctcaggacgaacgctggcggcgtgcctaacacatgcaagtcgaacgaggtccaaccagtggcaacactggggaagacctagtggcgaacgggtgagtaacacgtgaggaacttgccccgaagaccgggataaccacccgaaagggtggctaataccggatatcctcatcgagccgcatggcttggtgaagaaatggattccgcttcgggagagcctcgcggcctatcagctagttggtggggtaacggcctaccaaggcatcgacgggtagctggtctgagaggacgatcagccacactgggactgagacacggcccagactcctacgggaggcagcagtggggaatcttgcgcaatgggcgaaagcctgacgcagcaacgccgcgtgcgggatgaaggccttcgggttgtaaaccgctttcagtggggacgaaccaagacggtacccacagaagaagccccggccaactacgtg

SEQ ID NO: 9234 - DNA, 490 bp, unidentified
  misc_feature 1..490: note = Ascusbbf_1653029, encodes 16S rRNA
  source 1..490: mol_type = genomic DNA
agagtttgaccatggctcaggacgaacgctggcggcgtgcctaacacatgcaagtcgagcgaagtgatttcgaatgaaattttcggatggattttggaattatcttagcggcggacgggtgagtaacgcgtgagaaacctgcctttcacaaagggatagcctcgggaaactgggattaataccttatgacactttaacctcgcatggggaataagttaaagcgtagagcggtgaaagatggtctcgcgtcctattagctagttggtgaggtaacggctcaccaaggcgacgataggtagccggcctgagagggtgaacggccacactggaactgagacacggtccagactcctacgggaggcagcagtggggaatattgcacaatggaggaaactctgatgcagcgacgccgcgtgaatgatgaaggccttcgggtcgtaaaattctgtccttggggaagataatgacggtacccaaggaggaagccccg

SEQ ID NO: 9235 - DNA, 490 bp, unidentified
  misc_feature 1..490: note = Ascusbbf_1592137, encodes 16S rRNA
  source 1..490: mol_type = genomic DNA
agagtttgatcatggctcaggatgaacgctagctacaggcctaacacatgcaagtcgaggggcagcgggggcagagcttgctttacctgccggcgaccggcgcacgggtgcgtaacgcgtatcgaacctcccccatactcgggaatagccttgcgaaagtaagattaatgcccgatggtctcagaatatgacatcatgctttgagtaaagattcatcggtatgggatggcgatgcgtctgattagatagttggcggggtaacggcccaccaagtcgtcgatcagtaggggttctgagaggaaggtcccccacattggaactgagacacggtccaaactcctacgggaggcagcagtgaggaatattggtcaatggtcggaagactgaaccagccaagtagcgtgaaggatgactgccctacgggttgtaaacttcttttgccgggggataaggacgcccacgtgtgggtgtttgaaggtacccggagaat

SEQ ID NO: 9236 - DNA, 490 bp, unidentified
  misc_feature 1..490: note = Ascusbbf_1293488, encodes 16S rRNA
  source 1..490: mol_type = genomic DNA
agagtttgatcctggctcaggacgaacgctggcggcgtgcttaagacatgcaagtcgagcggggaacaattgaaagcttgcttttgagagttcctagcggcggacgggtgagtaacgcgtgagcaacctgccttatacactgggataacagttggaaacagctgctaataccggatatgaccacaactgggcatccagaaggggtgaaagggtttactggtataagatgggctcgcgtctgattagctagttggtgaggtaacggcccaccaaggcgacgatcagtagccgacctgagagggtgatcggccacattggaactgagatacggtccaaactcctacgggaggcagcagtcgggaatattgggcaatggaggaaactctgacccagcaacgccgcgtggaggatgaaggtcttcggattgtaaacttctgttctaggggaagaaacaaatgacggtaccctaggagcaagccccggctaacta

SEQ ID NO: 9237 - DNA, 470 bp, unidentified
  misc_feature 1..470: note = Ascusbbf_378633, encodes 16S rRNA
  source 1..470: mol_type = genomic DNA
agagtttgatcatggctcagaacgaacgctggcggcaggcctaacacatgcaagtcgagcgctgtagcaatacggagcggcagacgggtgagtaacacgtggaaatctacctatcggtggggaataacttcgggaaactggagctaataccgcatacgccctgagggggaaagatttatcgccgatagatgagtccgcgtctgattagctagttggtggggtaaaggcctaccaaggcgacgatcagtagctggtctgagaggatgatcagccacattgggactgagacacggcccaaactcctacgggaggcagcagtggggaatattggacaatgggcgcaagcctgatccagccatgccgcgtgagtgatgaaggccttagggttgtaaagctctttcaccggtgaagataatgacggtaaccggagaagaagccccggctaacttcgtgccagcagccgcggtaat

SEQ ID NO: 9238 - DNA, 480 bp, unidentified
  misc_feature 1..480: note = Ascusbbf_1504509, encodes 16S rRNA
  source 1..480: mol_type = genomic DNA
agagtttgatcctggctcagaacgaacgctggcggcaggcctaacacatgcaagtcgaacgagaagccaccttcgggtggtggacagtggcagacgggtgagtaacgcgtgggaacgtgcctttcggttcgggataacccagggaaacttgggctaataccggatacgcccttcgggggaaagattcattgccgaaagatcggcccgcgtcggattagctagttggtggggtaatggcctaccaaggcgacgatccgtagctggtctgagaggatgaccagccacactgggactgagacacggcccagactcctacgggaggcagcagtggggaatattggacaatgggcgaaagcctgatccagccatgccgcgtgggtgaagaaggccttagggttgtaaacccctttcagcggggaagataatgacggtacccgcagaagaagtcccggctaactccgtgccagcagccgcggtaat

SEQ ID NO: 9239 - DNA, 361 bp, unidentified
  misc_feature 1..361: note = Ascusbbf_1764561, encodes 16S rRNA
  source 1..361: mol_type = genomic DNA
agagtttgatcctggctcagaacgaacgctggcggcgcgtcttaagcatgcaagtcgagcgggatccgggggcttgctcccggtgagagcggcggactggcgaggaacgcgtgggcgacgcgccctccggagggggacagcccgtggaaacacggggtaataccccatggcatggttggcttggaggccagccatcaaaggagcttcggctccgccgggggagcggcccgcgacccatcagctagttggcggggcaagggcccaccaaggctacgacgggtatccggcctgagagggcgaacggacgcattgggactgagatacggcccagactcctacgggagccagcagccgcggtaat

SEQ ID NO: 9240 - DNA, 490 bp, unidentified
  misc_feature 1..490: note = Ascusbbf_1817064, encodes 16S rRNA
  source 1..490: mol_type = genomic DNA
agagtttgatcctggctcaggatgaacgctggcggcgtgcataacacattcaagtcgaacggagtaaagagcttcggttttttacttagtggcggacgggtgagtaacgcgtgagcaacctgcccctgtgtgcgggataacgttcggaaacggacgctaataccgcataaaccaaagagaccgcatggtcacggtggcaaagatttattgcacagggatgggctcgcgtccgattagatagttggcggtgcaacggaccaccaagtcgacgatcggtagccggactgagaggttgaacggccacattggaactgagagacggtccagactcctacgggaggcagcagtggggaatattgggcaatgggcgaaagcctgacccagcgacgccgcgtgaaggaagacggtcttcggattgtaaacttcttttatgtaggacgaaggcagtgacggtactacatgaataagccacggctaactacgtgccagc

SEQ ID NO: 9241 - DNA, 490 bp, unidentified
  misc_feature 1..490: note = Ascusbbf_640073, encodes 16S rRNA
  source 1..490: mol_type = genomic DNA
agagtttgatcatggctcaggacgaacgctggcggcgtgcttaacacatgcaagtcgaacgatgaaccaggagcttgctcctggggattagtggcgaacgggtgagtaacacgtgggtaacctgccccagacactgggataacttcgggaaaccgaagctaataccggatatgaccactttggacatccaacggtggtggaaagatttatcggtctgggatggacccgcggcctatcagctagttggaggggtaacggcccaccaaggcgacgacgggtagccggcctgagagggtgaccggccacactggaactgagacacggtccagactcctacgggaggcagcagtggggaatattgcacaatgggcgcaagcctgatgcagcgacgccgcgtgagggacgacggccttcgggttgtaaacctctttcagcagggacgaagcgaaagtgactgtacctgcagaagaagcaccggctaactacgtgc

SEQ ID NO: 9242 - DNA, 488 bp, unidentified
  misc_feature 1..488: note = Ascusbbf_1847561, encodes 16S rRNA
  source 1..488: mol_type = genomic DNA
agagtttgatcatggctcaggattaacgctggcggcgtgcctaacacatgcaagtcgaacgaaatacttttgtatttagtggcgaacgggtgagtaatgtacaggtaatgtacctccgtactgcgaataacaagctgaaaagtttgctaatatggaatagtttcctcagagggcatccttagaggaataaagatttatcgtgcggagatcagcctgtatcctattagttagttggtggggtaatggcctaccaagacgacgatgggtaactggtctgagaggatgagcagtcacattggaactgagaaacggtccaaactcctacgggaggcagcagtgaggaattttgcgcaatgggggaaaccctgacgcagcaacgccgcgtgagtgacgacggccttcgggttgtaaagctctgtcgtgtgtgacgagtagggatggtaacacacaaggaagcctcggctaactacgtgccacagcgcggtaat

SEQ ID NO: 9243 - DNA, 490 bp, unidentified
  misc_feature 1..490: note = Ascusbbf_1219050, encodes 16S rRNA
  source 1..490: mol_type = genomic DNA
agagtttgaccatggctcaggatgaacgctagctataggcttaacacatgcaagtcggggggcagcacgggaagcagcaatgcttttgagaggcgaccggcgaatgggtgagtaacgagtatccaacctgccccgcgctccgggacagccccgcgaaagcgggattaataccggatgcggcatggttcccgcatgggttccatgtcaaagattcatcggcgcgggatggggatgcgtccgattagcttgttggcggggcaacggcccaccaaggcgatgatcggtaggggttctgagaggaaggtcccccacattggaactgagacacggtccaaactcctacgggaggcagcagtgaggaatattggtcaatggccgtaaggctgaaccagccaagtagcgtgagggatgaccgccctatgggttgtaaacctcttttgcgcgggaataatccgcactacgcgtagtgcgttgcatgtaccgtgcgaat

SEQ ID NO: 9244 - DNA, 490 bp, unidentified
  misc_feature 1..490: note = Ascusbbf_1633685, encodes 16S rRNA
  source 1..490: mol_type = genomic DNA
agagtttgatcctggctcagaacgaacgctggcggcgtgcttaatacatgcaagtcgaacgtgaaacgagtagcaatacttgtggaaagtggcgaacgggtgagtaatacgtaagcaatctacctttaagattgggataaccttgccaacgcggggctaataccggatgtggtcattttaacgcatgttagaatgattaaaggagtgatccgcttaaggatgagcttgcggcccattagttagttggcggggtaacggcccaccaagaccgcgatgggtagccggcctgagagggtggacggccacattgggactgagatacggcccagactcctacgggaggcagcagtagggaattttgcgcaatggacgaaagtctgacgcagcaacgccgcgtgagggatgacggccttcgggttgtaaacctctgttggatgggaaaaaaagtagcaatatttgatggtaccattcgagtaagcaccggctaact

SEQ ID NO: 9245 - DNA, 470 bp, unidentified
  misc_feature 1..470: note = Ascusbbf_1255352, encodes 16S rRNA
  source 1..470: mol_type = genomic DNA
agagtttgatcatggctcaggatgaacgctggcggcgtgcctaacctatgcaagtcgaacgaggctttgagccgagtggcagacgagtgagtaacacgtacctaatctgcccgtaagtggggaataattcgtcgaaagacggactaataccgcatgtgctccacggagtaaagcttttgcgcttacggatgagggtgcggcctatcagctagttggtaaggtaatggcttaccaaggctatgacgggtagctggtctgagaggatgatcagccacgctgggactgagatacggcccagactcctacgggaggcagcaagtgggaatattgcacaatggacgcaagtctgatgcagcgacgccgcgtgggggatgaaggttttcggatcgtaaaccccttttatcgattaggaagatatgaccagtcgatgaataagcacctgctaactacgtgccagcagccgcggtaat

SEQ ID NO: 9246 - DNA, 490 bp, unidentified
  misc_feature 1..490: note = Ascusbbf_506309, encodes 16S rRNA
  source 1..490: mol_type = genomic DNA
agagtttgatcctggctcagaacgaacgctggcggcaggcctaacacatgcaagtcgagcgtgaaaggggcttcggccctgagtaaagcggcgcacgggtgagtaacacgtgaataatctgccctcatgaccgggataacagatcgaaagaactgctaataccggataagcctccacaccaaccgggtgagtggggaaaagaacgggactttcgggccgttcgcgtgaggatgagttcgcgttccattagatagttggtgaggtaatggctcaccaagtcgacgatggatagctggtctaagaggatgatcagccacactggaactgagacacggtccagactcctacgggaggcagcagtggggaatcttgcgcaatggaggaaactctgacgcagccatgccgcgtgagtgatgaaggccctcgggttgtaaagctctgtctaaggggacgaatggcgttatgtacaagacgcatgacgattgacggt

SEQ ID NO: 9247 - DNA, 490 bp, unidentified
  misc_feature 1..490: note = Ascusbbf_165925, encodes 16S rRNA
  source 1..490: mol_type = genomic DNA
agagtttgatcatggctcagattgaacgctggcggcaggcttaatacatgcaagtcgaacggtaacacgcaggaagcaattcctgtggtgacgagtggcggacgggtgagtaaagtttgggaatctgtccttcagagggggatagcagctggaaacggctgataaaaccgcatacgctctgaggaggaaagtgacgggaccggcgacggccgtcagctgaagggtgagcccaaatgggattagctagtaggggaggtaaaggctcacctaggcgacgatctctagctggttttagcggatgaccagccacattggaactgagacacggtccaaactcctacgggaggcagcagtagggaatattgcacaatggagggaactctgatgcagccatgccgcgtgtgtgaagaaggccttcgggttgtaaagcacttttactgcggagaagggttgatgcaataataaggcattaaccggatgttacgcaggg

SEQ ID NO: 9248 - DNA, 490 bp, unidentified
  misc_feature 1..490: note = Ascusbbf_170318, encodes 16S rRNA
  source 1..490: mol_type = genomic DNA
agagtttgatcctggctcaggacgaacgctggcggcgcgcctaacacatgcaagtcgaacgaagctatgttgaaagcttgctggatatatagcttagtggcggacgggtgagtaacacgtgagtaacctgcctctcagagtggaataacgtttggaaacggacgctaataccgcataacgtgagaagagggcatcctctttttaccaaagatttatcgctgagagatgggctcgcggccgattaggtagttggtgagataacagcccaccaagccgacgatcggtagccggactgagaggttgatcggccacattgggactgagacacggcccagactcctacgggaggcagcagtgggggatattgcacaatgggggaaaccctgatgcagcgacgccgcgtgagggaagacggttttcggattgtaaacctctgtctttagggacgaataaatgacggtacctaaggaggaagccacggctaactacg

SEQ ID NO: 9249 - DNA, 490 bp, unidentified
  misc_feature 1..490: note = Ascusbbf_493414, encodes 16S rRNA
  source 1..490: mol_type = genomic DNA
agagtttgatcctggctcaggacgaacgctggcggcgtgcctaacacatgcaagtcgaacggagtttaagaagcttgctttttaaacttagtggcggacgggtgagtaacgcgtgagcaacctgcctctcagtggggaataatgtactgaaaaggacactaataccgcatgacgtattttagccgcatgactgagataccaaagatttatcgctgagagatgggctcgcgtccgattagctggttggtgaggtaacggctcaccaaggcgacgatcggtagccggactgagaggttgaacggccacattgggactgagacacggcccagactcctacgggaggcagcagtgggggatattgcgcaatgggggaaaccctgacgcagcaatgccgcgtggaggattgaaggtcttcggattgtaaactccttttgtcagggaagataatgacggtacctgacgaataagctccggctaactacgtgccagc

SEQ ID NO: 9250 - DNA, 490 bp, unidentified
  misc_feature 1..490: note = Ascusbbf_1683793, encodes 16S rRNA
  source 1..490: mol_type = genomic DNA
agagtttgatcctggctcaggacgaacgctggcggcgtgcttaacacatgcaagtcgaacgggactttgctttgtagcaatacagagtaaagtttagtggcagacgggtgagtaatgtataaggaacctaccttcgagtggggaataacagtccgaaaggattgctaataccccataacataacttagtggcatcaccgagttatcaaagatttatcgcttggagatggtcttatattctatcagcttgttggcagtgtaacggactaccaaggcgacgacggatagccggcctgaaagggcgaccggccacaagggcactgagacacgggccctactcctacgggaggcagcagtggggaattttggacaatgggcgcaagcctgatccagcaacgatgcgtggaggacgaaggttttcggattgtaaactccttttgtgagggaagaaacaaatgacggtacctcacgaataagccacggctaactac

SEQ ID NO: 9251 - DNA, 472 bp, unidentified
  misc_feature 1..472: note = Ascusbbf_122063, encodes 16S rRNA
  source 1..472: mol_type = genomic DNA
agagtttgatcatggctcagaacgaacgctggcggcaggcctaaaacatgcaagttgaacggttgtagcaatacagcagtagcggacgggtgaggaacatatgggaacgtaccctttggtgtgggataacatctggaaacgggtgataataccgcataagccacaagtgggaaagatttattgccgaaggagcggcccatattggattagctagttggttaggtaaaggctgaccaaggcgacgatccatagccggtttgagaggatgatcggccacactgggactgagacacggcccagactcctacgggaggcagcagttaggaatattggacaatgggggaaaccctgatccagccatgccgcgtgagtgaagaaggccttcgggttgtaaagctcttttgtatgggaaaatgatgatggtaccataagaataagcaccggcaaacttcgtgccagcagccgcggtaat

SEQ ID NO: 9252 - DNA, 490 bp, unidentified
  misc_feature 1..490: note = Ascusbbf_1788085, encodes 16S rRNA
  source 1..490: mol_type = genomic DNA
agagtttgatcctggctcagaacgaacgctggcggcatggattaggcatgcaagtcgagcgggatttatcatcatgagtcttcggatgaatgaggatgatgagagcggcaaacgggtgcgtaacacgtaaacaacttgccctttagttcgggatagctcaccgaaaggtggattaataccggatgtggttttcttttgcatggaagagatactaaagcttgtaacggcgctaaaggagaggtttgcgtcctatcagcttgttggtgaggtaaaggcttaccaaggcaaagacgggtagctggtctgagaggatgatcagccacagtggaactgagacacggtccacacacctacgggtggcagcagtttcgaatcattcacaatgggcgaaagcctgatggtgcaacgccgcgtgggggatgaaggttctcgaatcgtaaacctctgtcgccgaggaacaaaatccgggttcatagcccggcttgagtta

SEQ ID NO: 9253 - DNA, 468 bp, unidentified
  misc_feature 1..468: note = Ascusbbf_162215, encodes 16S rRNA
  source 1..468: mol_type = genomic DNA
agagtttgatcatggctcagaacgaacgctggcggcaggcttaacacatgcaagtcgagcgccccgcaaggggagcggcagacgggtgagtaacgcgtgggaaactaccctttggtacggaataacacagagaaatttgtgctaataccgtatgtgcccttcgggggaaagatttatcgccataggatgtgcccgcgtaggattagctagttggtgtggtaatggcgcaccaaggcgacgatccttagctggtctgagaggatgatcagccacactgggactgagacacggcccagactcctacgggaggcagcagtggggaatattggacaatgggcgcaagcctgatccagccatgccgcgtgagtgatgaaggccttagggttgtaaagctctttcacccacgacgataatgacggtagtgggagaagaagccccggctaacttcgtgccagcagccgcggtaat

SEQ ID NO: 9254 - DNA, 490 bp, unidentified
  misc_feature 1..490: note = Ascusbbf_1195056, encodes 16S rRNA
  source 1..490: mol_type = genomic DNA
agagtttgatcatgctcaggacaaacgctggcggcgtgcctaacacatgcaagtcgaacgaagcagcggggaaagagacttcggtcaatggaaccgttgacttagtggcggacgggtgagtaatgcatgagcaacctgccctggagagggggacaacagctggaaacggctgctaataccgcatgaagttattgggaggcatctcccggtaaccaaagatttatcgctctgggatgggctcatgtctgattagatagttggcggggcaacggcccaccaagtctacgatcagtagccggactgagaggttgaacggccacattgggactgagatacggcccagactcctacgggaggcagcagtggggaatattgggcaatgggcgcaagcctgacccagcaacgccgcgtgaaggaagaaggctttcgggttgtaaacttcttttatcagggacgaagtagtgacggtacctgatgaataagccacggc

SEQ ID NO: 9255 - DNA, 490 bp, unidentified
  misc_feature 1..490: note = Ascusbbf_438598, encodes 16S rRNA
  source 1..490: mol_type = genomic DNA
agagtttgatcctggctcagagttaacgctggcggcgtgcctaacacgtgcaagtcgggcgggggatggcagagtatcgcgtccctagcggcagacgggtgagtaacgcgtaggcaacctgcccctgtcagggagacaaccctctgaaaggagggctgatatcccgtagtcccggagggaggcatcttcctctggggaaagcggcgacgcggacagggaggggcctgcggcctatcagctagttggcggggcaacggcccaccaaggcaaagacgggtagccgatctaaaaggatgaccggccacaaggggactgagacacggcccctactcctacgggaggcagcagtggggaattttggacaatgggggaaaccctgatccagcgacgccgcgtggaggacggaggctttcgggttgtaaactccttttgtccggggcgaaagtgcgcgagcatctggcggtaccggacgaataagccacagctaact

SEQ ID NO: 9256 - DNA, 490 bp, unidentified
  misc_feature 1..490: note = Ascusbbf_1708215, encodes 16S rRNA
  source 1..490: mol_type = genomic DNA
agagtttgatcctggctcagaatgaacgttggcggcgtggattaggcatgcaagtcgcgcgagaaatctccttcgggagatggacagcggcggaagggagaggaacaagtagaaatctgccctcgggacggggatagcggcgggaaactgccggtaatacccgataacatctttggatcaaatggtgtgattccgcctgaggatgagtctacttcctattagctagttggcggggtaatggcccaccaaggcaacgatgggtagcgggtgtgagagcacgatccgcctcactgggactgagacactgcccagacacctacgggtggctgcagtcgagaatcttcggcaatgggggaaaccctgaccgagcgacgccgcgtgcgggatgaaggccctcgggttgtaaaccgctgtcgtaagggaacaaatttacgggggtactcccctgtaattgagtgatcttaggaggaaggacgggctaagttcgtgc

SEQ ID NO: 9257 - DNA, 490 bp, unidentified
  misc_feature 1..490: note = Ascusbbf_660394, encodes 16S rRNA
  source 1..490: mol_type = genomic DNA
agagtttgatcatggctcagattgaacgctagcgggatgctttacacatgcaagtcgaacggcagcgcggacttcggtctggcggcgagtggcggacgggtgagtaatgtatcggaacgtgcccagtagcgggggataactacgcgaaagcgtggctaataccgcatacgccctacgggggaaagggggggatcttaggacctctcactattggagcggccgatatcggattagctagttggtggggtaaaggcctaccaaggcgacgatccgtagctggtttgagaggacgaccagccacactgggactgagacacggcccagactcctacgggaggcagcagtggggaattttggacaatgggggcaaccctgatccagccatcccgcgtgtgcgatgaaggccttcgggttgtaaagcacttttgtcagggaagaaacaggcgcggctaatatccgcgctgaatgacggtacctgaagaataagcac

SEQ ID NO: 9258 - DNA, 490 bp, unidentified
  misc_feature 1..490: note = Ascusbbf_1354459, encodes 16S rRNA
  source 1..490: mol_type = genomic DNA
agagtttgatcctggctcagattgaacgctggcggcatgcctaacacatgcaagtcgaacgatgattactagcttgctagtatgattagtggcggacgggtgagtaatgtatagggatctgcctgttagtgggggacaacagccggaaacggctgctaataccgcatacgctctacggaggaaagtgggggaccttcgggcctcacgctaacagatgaacctatatcagattagctagttggtggggtaagggcctaccaaggcgacgatctgtagctggtttgagagaatgatcagccacactgggactgagacacggcccagactcctacgggaggcagcagtggggaatattggacaatggggggaaccctgatccagcaatgccgcgtgtgtgaagaaggccttcgggttgtaaagcactttaagttgggaggaaagcctgagagttaatagcttttaggggtgacgttaccaacagaataagcac

SEQ ID NO: 9259 - DNA, 490 bp, unidentified
  misc_feature 1..490: note = Ascusbbf_617508, encodes 16S rRNA
  source 1..490: mol_type = genomic DNA
agagtttgatcatggctcaggatgaacgctggcggcgtgcttaacacatgcaagtcgaacggaactgcatataaagaatctcttcggagaggattttttgtagtttagtggcggacgggtgagtaacgcgtgagtaacctgcccttgagagggggataacgttctgaaaaggacgctaataccgcataatactattgaatcgcatggtttaatagtcaaaactgaggtgctcagggatggactcgcgtccgattagatagttggtgaggtaacggctcaccaagtcgacgatcggtagccggactgagaggttgaacggccacattgggactgagacacggcccagactcctacgggaggcagcagtgggggatattgcgcaatgggggaaaccctgacgcagcaacgccgcgtggatgaagacggttttcggattgtaaagtccttttcttagggacgaattctgacggtacctaaggaataagctccg

SEQ ID NO: 9260 - DNA, 490 bp, unidentified
  misc_feature 1..490: note = Ascusbbf_696140, encodes 16S rRNA
  source 1..490: mol_type = genomic DNA
agagtttgatcatggctcaggacgaacgctggcggcgtgcttaacacatgcaagtcgaacgggatccatgtagtcgcaagactacggaagatctagcggcgaacgggtgcgtaacacgtgaggaacctaccccggactctggaataacagatggaaacatctgctaataccggatgccgtctcatcacctcctggtggagagacgaaagatttatcggtccgggagggcctcgcggcctatcagcttgttggtgaggtaaaggctcaccaaggcatcgacgggtagctggtctgagaggatgatcagccacactgggactgagacacggcccagactcctacgggaggcagcagtggggaatcttgcacaatgggcgcaagcctgatgcagcaacgccgcgtgcgggaagaaggccttagggttgtaaaccgctttcagtagggaagaaaatgacggtacctatagaagaaggtgcggccaactacgtgc

SEQ ID NO: 9261 - DNA, 490 bp, unidentified
  misc_feature 1..490: note = Ascusbbf_323461, encodes 16S rRNA
  source 1..490: mol_type = genomic DNA
agagtttgatcctggctcaggatgaacgctagcggcaggcctaacacatgcaagtcgaggggtagggggtgcttgcacccttgagaccggcgcacgggtgagtaacgcgtatggaatctgccctctacaggggaatagcccagggaaacttggattaatgccccatggtattattggactgcatggtcctttaattaaagatttatcggtaggggatgatcatgcgtaccattagctggttggtgtggtaacggcacaccaaggctacgatggttaggggccctgagagggggatcccccacactggtactgagacacggaccagactcctacgggaggcagcagtgaggaatattggacaatgggcgggagcctgatccagccatgccgcgtgcaggaagacagccctatgggtcgtaaactgcttttacagaggaagaaacacccccacgtgtgggggcttgacggtactctgcgaataaggaccggc

SEQ ID NO: 9262 - DNA, 490 bp, unidentified
  misc_feature 1..490: note = Ascusbbf_394906, encodes 16S rRNA
  source 1..490: mol_type = genomic DNA
agagtttgatcatggctcagattgaacgctggcggcatgctttacacatgcaagtcgaacggcagcacgggtgcttgcacctggtggcgagtggcgaacgggtgagtaatacgtcggaacgtaccgagtaatgggggataacgcagcgaaagctgtgctaataccgcatacgtccttagggagaaagtgggggactttttaagcctcacgttattcgagcggccgacgtctgattagctagttggtggggtaagagcccaccaaggcgacgatcagtagcgggtctgagaggatgatccgccacattgggactgagacacggcccaaactcctacgggaggcagcagtggggaattttggacaatgggcgcaagcctgatccagccatgccgcgtgtctgaagaaggccttcgggttgtaaaggacttttgttagggaagaaaagccaattgataataccagttggtgctgacggtacctaaagaataag

SEQ ID NO: 9263 - DNA, 490 bp, unidentified
  misc_feature 1..490: note = Ascusbbf_1714772, encodes 16S rRNA
  source 1..490: mol_type = genomic DNA
agagtttgatcatggctcaggatgaacgctggcggcgtgcttaacacatgcaagtcgaacgaggtgtagcaatacaccgagtggcggacgggtgagtaacgcgtgagcaacctgcccttgtcaggggaataacacagagaaatctgtgctaataccgcatgacgttgaatcaaggcatcttgaatcaaccaaagcgaaaaagcggacaaggatgggctcgcgtcccattaggtagttggtgaggtaacggcccaccaagccgacgatgggtagccgacctgagagggtgatcggccacattggaactgagaacggtccagactcctacgggaggcagcagtggggaatattgggcaatggagggaactctgacccagcaacgccgcgtgaatgaagaaggtcttcggattgtaaagttctgtgatgggggacgaagaaagtgacggtaccccaatagcaagctacggctaactacgtgccagcagccgcg

SEQ ID NO: 9264 - DNA, 490 bp, unidentified
  misc_feature 1..490: note = Ascusbbf_293530, encodes 16S rRNA
  source 1..490: mol_type = genomic DNA
agagtttgatcctggctcagattgaacgctggcggcatgctttacacatgcaagtcggacggcagcgggggtgcttgcacctgccggcgagtggcgaacgggtgagtaatatattggaacgtaccgagtaatgggggataactatccgaaaggatagctaataccgcatacgctttgagaaggaaagcaggggatcttcggaccttgcgttattcgagcggccaatatctgattagctagttggtggggtaaaggcctaccaaggcgacgatcagtagcgggtctgagaggatgatccgccacactgggactgagacacggcccagactcctacgggaggcagcagtggggaattttggacaatgggcgcaagcctgatccagccatgccgcgtgtctgaagaaggccttcgggttgtaaaggacttttgtcagggaagaaaaggttggtgctaatatcactgactgatgacggtacctgaagaataagc

SEQ ID NO: 9265 - DNA, 490 bp, unidentified
  misc_feature 1..490: note = Ascusbbf_1149687, encodes 16S rRNA
  source 1..490: mol_type = genomic DNA
agagtttgatcatggctcaggatgaacgctagcgataggcttaacacatgcaagtcgaggggtaacatgggagtagcttgctacttctgatgacgaccggcggatgggtgagtaacgcgtatgcaacttgcctcttagtggggaataacccggagaaatccggactaataccgcatacacttagttatccgcatggatgattaaggaaagatttattgctaagagataggcatgcgttccattagttagttggtgaggtaacggctcaccaaggcatcgatggataggggagctgagaggcttatcccccacattgggactgagacacggcccaaactcctacgggaggcagcagtgaggaatattggtcaatggaggaaactctgaaccagccaagtcgcgtgaaggatgactgtcctatggattgtaaacttctttagtaggcgagtaaacgtaggtacgagtacctacctgcaagtagcctaagaat

SEQ ID NO: 9266 - DNA, 470 bp, unidentified
  misc_feature 1..470: note = Ascusbbf_1901657, encodes 16S rRNA
  source 1..470: mol_type = genomic DNA
agagtttgatcctggctcagaacgaacgctggcggcaggcttaacacatgcaagtcgaacgaagtcttcggacttagtggcgcacgggtgagtaacacgtgggaatatacctttcggtgggggataacatcgggaaactgatgctaataccgcatacgcccttcgggggaaagatttatcgccgaaagattagcccgcgtccgattagctagtaggtagggtaatggcctaccaaggctccgatcggtagctggtctgagaggatggccagccacactgggactgagacacggcccagactcctacgggaggcagcagtggggaatattggacaatgggggaaaccctgatccagccatgccgcgtgagtgatgaaggccttagggttgtaaagctctttcacccacgacgatgatgacggtagtgggagaagaagccccggctaacttcgtgccagcagccgcggtaat

SEQ ID NO: 9267 - DNA, 490 bp, unidentified
  misc_feature 1..490: note = Ascusbbf_1413481, encodes 16S rRNA
  source 1..490: mol_type = genomic DNA
agagtttgatcatggctcaggatgaacgctggcggcgtgcctaacacatgcaagtcgaacgaagcacttagacagaaccttcgggtgacgtattggtgactgagtggcggacgggtgagtaacgcgtgggtaacctgccctgtacagggggataacagttagaaatgactgctaataccgcataagcgcacgatggtagcattaccaggtgtgaaaaactccggtggtacaggatgggcccgcgtctgattagcttgttggcggggtaagagcccaccaaggcgacgatcagtagccggtctgagaggatgaacggccacattggaactgagacacggtccaaactcctacgggaggcagcagtggggaatattgcacaatggggggaaccctgatgcagcaacgccgcgtgagtgaagaagtatttcggtatgtaaagctctatcagcagggaagataatgacggtacctgactaagaagctccggcta

SEQ ID NO: 9268 - DNA, 490 bp, unidentified
  misc_feature 1..490: note = Ascusbbf_686226, encodes 16S rRNA
  source 1..490: mol_type = genomic DNA
agagtttgatcctggctcaggatgaacgctagctacaggcttaacacatgcaagtcgaggggcagcgggaaggaagcttgctttctttgccggcgaccggcgcacgggtgcgtaacgcgtatcaaacctgccgtatactcggggatagccttgcgaaagtaagattaatacccgatgttgtttaggtgccgcatgacacttaaaccaaagatttattggtatacgatggtgatgcgtctgattaggtagttggtagggtaacggcctaccaagccgacgatcagtaggggttctgagaggaaggtcccccacactggaactgagacacggtccagactcctacgggaggcagcagtgaggaatattggtcaatggacggaagtctgaaccagccaagtagcgtgcaggatgacggccctctgggttgtaaactgcttttagttgggaataaaaaaggggacgtgtccctaattgtatgtaccatcagaaa

SEQ ID NO: 9269 - DNA, 490 bp, unidentified
  misc_feature 1..490: note = Ascusbbf_332101, encodes 16S rRNA
  source 1..490: mol_type = genomic DNA
agagtttgatcctggctcaggatgaacgctggcggcgtgcctaacacattcaagtcgaacggtgaagggacttcggtcccggatcagtggcggacgggtgagtaacgcgtgagcaacctgcctttgcttgggggataacagttggaaacgactgctaataccgcataaagcggcagaaccgcatggttcaaccgccaaagatttattgagcaaagatgggctcgcgtccgattagatagttggtgaggtaacggcccaccaagtctgcgatcggtagccggactgagaggttgaacggccacattggaactgagaaacggtccagactcctacgggaggcagcagtggggaatattgggcaatgggcgaaagcctgacccagcgacgccgcgtgaaggaagaaggccctcgggttgtaaacttcagtcaacagggaagaaacaaatgacggtacctgtggaggaagccacggctaactacgtgccagcag

SEQ ID NO: 9270 - DNA, 487 bp, unidentified
  misc_feature 1..487: note = Ascusbbf_539361, encodes 16S rRNA
  source 1..487: mol_type = genomic DNA
agagtttgatcatggctcaggacgaacgctggcggcgtgcttaacacatgcaagtcgaacgagaccttcgggtcgagtggcggacgggtgagtaacacgtaggtaatctgcctctcagtgggggataccaggccgaaaggtctgttaataccgcatacgctccatcgttgggatacggtggaggaaagatttatcgttgagagatgagcctgcgtccgattagctagttggtagtgtaatggactaccaaggcgacgatcggtagctggtctgagaggacgatcagccacactggaactgagacacggtccagactcctacgggaggcagcagtggggaattttccgcaatgggcgaaagcctgacggagcaacgccgcgtgaatgaagaagcccttcgggatgtaaagttctttcagcagggacgagtcgaagacggtacctgcagaagaagcatcggctaactacgtgccagcagccgcggtaat

SEQ ID NO: 9271 - DNA, 490 bp, unidentified
  misc_feature 1..490: note = Ascusbbf_1377170, encodes 16S rRNA
  source 1..490: mol_type = genomic DNA
agagtttgatcctggctcaggacgaacgctggcggcgtgcctaacacatgcaagtcgagcgggaaattatcgaatgaagcttcggcagaatttgataatggatagcggcggacgggtgagtaacgcgtgagtaacctgcccttaagagggggataacacagagaaatttgtgctaataccgcataacatatattttcggcatcgaagatatatcaaagatttatcgcttaaggatggactcgcgtctgattagatagttggtgaggtaacggcccaccaagtcgacgatcagtagccgaactgagaggttgatcggccacattgggactgagacacggcccagactcctacgggaggcagcagtggggaatattgcgcaatgggggcaaccctgacgcagcaacgccgcgtgaaggatgaaggtcttcggattgtaaacttttgtcttatgggaagaaaaaaatgacggtaccataggaggaagccacgg

SEQ ID NO: 9272 - DNA, 198 bp, unidentified
  misc_feature 1..198: note = Ascusbbf_176353, encodes 16S rRNA
  source 1..198: mol_type = genomic DNA
agagtttgatcctggctcagagagtttgatcatggctcagagagtttgatcctggctcagagagtttgatcatggctcagagagtttgatcctggctcagagagtatgatcctggctcagagagtttgatcctggctcagagagtttgatcctggctcagagagtttgatcatggctcaggccagcagccgcggtaat

SEQ ID NO: 9273 - DNA, 490 bp, unidentified
  misc_feature 1..490: note = Ascusbbf_1798134, encodes 16S rRNA
  source 1..490: mol_type = genomic DNA
agagtttgatcatggctcaggacgaacgctggcggcgcgcttaacacatgcaagtcgaacggggctctttcgggggcccagtggcgaacgggtgcgtaacacgtgagcaacctgcctggagttgggggataacctcgggaaaccggggctaataccgcatgtgctcttttatccggatggatgggagaggaaaggagctttcgggctctgacttcagaggggctcgcggcgtatcagctagctggtggggtaatggcctaccagggcgacgacgcgtagggggtctgagaggatggccccccacattgggactgagatacggcccagactcctacgggaggcagcagtggggaatcttgcgcaatggccgaaaggctgacgcagcgacgccgcgtgcgggaggacgcttttcggagtgtaaaccgctgtcagaggggacgaaggcccctgggaggaaatgcccataggggagggacggtaccctcagagg

SEQ ID NO: 9274 - DNA, 490 bp, unidentified
  misc_feature 1..490: note = Ascusbbf_1246802, encodes 16S rRNA
  source 1..490: mol_type = genomic DNA
agagtttgatcctggctcagaacgaacgctggcggcatggattaggcatgcaagttgaacgaactccttcgggagtgagtagcggaagggtgaggaacgcgtgagtaatctgccccccagttgggaataacagttggaaacggctgctaataccgaatgtggcttaagcttcgcctggagctttggctaaagatttatcgctgggggatgagctcgcgtcccattaggtagttggtgaggtaacggctcaccaagccgacgatgggtagctggtctgagaggatggtcagccacactgggactgagacactgcccagactcctacgggaggctgcagtcgagaatcttgggcaatgcgcgaaagcgtgacccagcaatgccgcgtgtatgatgaaggccctcgggtcgtaaagtactgtctcccgtgacgaaatttgacggtagcggggaaggaagccacggctaactacgtgccagcagccgcggtaat

SEQ ID NO: 9275 - DNA, 373 bp, unidentified
  misc_feature 1..373: note = Ascusbbf_1389960, encodes 16S rRNA
  source 1..373: mol_type = genomic DNA
agagtttgatcatggctcaggacgaacgctggcggcgtgcctaacacatgcaagtcgaacggagttatgtcacgaagttcttcggagcggacgacatagcttagtggcggacgggtgagtaacgcgtgagcaacctgcctttcagagggggacaacggttggaaacgaccgctaataccgcatgaaatgactggaccgcatgatccggtcatcaaagattttatcgctgaaagatgggctcgcgtctgattagatagttggtggggtaacggcccaccaagtcgacgatcagtagccggactgagaggttgaacggccacattgggactgagacacggcccagactcctacgggagccagcagccgcggtaat

SEQ ID NO: 9276 - DNA, 490 bp, unidentified
  misc_feature 1..490: note = Ascusbbf_1798429, encodes 16S rRNA
  source 1..490: mol_type = genomic DNA
agagtttgatcatggctcagattgaacgctggcggcaggcctaacacatgcaagtcgagcgagaaagcccttcggggtgagtagagcggcggacgggtgagtaacgcgtgggaatctgcctgatagagggggataacagttggaaacgactgctaataccgcatacgctctacgggggaaaggaggggcttcattcgtgaacctttcgctatcagatgagctcacgttggattagctagatggtggggtaaaggcctaccatggcgacgatccatagctggtctgagaggatgatcagccacactgggactgagacacggcccagactcctacgggaggcagcagtggggaatattgcacaatgggggaaaccctgatgcagccatgccgcgtgtgtgaagaaggccttcgggttgtaaagcactttaagcgaggaggaaggcgtaacggttaatacccgttatgattgacgttactcgcagaataagca

SEQ ID NO: 9277 - DNA, 490 bp, unidentified
  misc_feature 1..490: note = Ascusbbf_705258, encodes 16S rRNA
  source 1..490: mol_type = genomic DNA
agagtttgatcatggctcaggacgaacgctggcggcgtgcttaacacatgcaagttgaacgggcgatattggaagcttgctgaagatatcgttagtagcggacgggtgagtaatgcatgaggacctgccttctggagggggacaacagttggaaacggctgctaataccccgtacgccgagaggtgaaaggaatggagacattccgccgggagagggactcatgtcctatcagctagttggtgaggtaacggctcaccaaggcgacgacgggtagccggcctgagagggcgaccggccacactggaactgagagacggtccagactcctacgggaggcagcagtggggaatattgggcaatgggggcaaccctgacccagcgacgccgcgtgagggaagaaggccttcgggtcgtaaaccgcttttgtacgtgaagaagcagatgacggtagcgtacgaataagtcccggctaactacgtgccagcagcc

SEQ ID NO: 9278 - DNA, 490 bp, unidentified
  misc_feature 1..490: note = Ascusbbf_1522829, encodes 16S rRNA
  source 1..490: mol_type = genomic DNA
agagtttgatcatggctcagattgaacgctggcggcaggcctaacacatgcaagtcgagcgcgaaaggttttcggactgagtaaagcggcggacgggtgagtaacgcgtgggaatctgcccagtagtgggggacaacagccggaaacggctgctaataccgcatacgccctacgggggaaagggggggatcttcggacctctcgctattggatgagcccgcgtcggattagcttgttggtggggtaaaggcctaccaaggcgacgatccgtaactggtctgagaggatgatcagtcacactggaactgagacacggtccagactcctacgggaggcagcagtggggaatattggacaatgggggcaaccctgatccagccatgccgcgtgtgtgaagaaggccttagggttgtaaagcactttcagtggggagaaaggtggtttggctaataaccggatcaattgatgttacccacagaagaagcaccgg

SEQ ID NO: 9279 - DNA, 490 bp, unidentified
  misc_feature 1..490: note = Ascusbbf_1230613, encodes 16S rRNA
  source 1..490: mol_type = genomic DNA
agagtttgatcatggctcagagtgaacgctggcggcgtggttcagacatgcaagtcgagcgaggagaggcttcggccaaacctagcggcgaacgggtgcgtaacacgtgagcaacctgccctgaagttcggaatagcctggcgaaagtcggattaataccggatgtggtgcggagtcgcatggctctgctaccaaagcttgtaatggcgcttcgggaggggctcgcggcctatcagcttgttggcgaggtaacggctcaccaaggctaagacgggtagctggtctgagaggatgatcagccacactggaactgagacacggtccagacacctacgggtggcagcagtttcgaatcattcacaatgggcgaaagcctgatggtgcaacgccgcgtgggggatgaaggccttcgggtcgtaaacccctgtcaccagggactaaacctgtggttcatagccacagctgaattaacctggagaggaagaggtgg

SEQ ID NO: 9280 - DNA, 490 bp, unidentified
  misc_feature 1..490: note = Ascusbbf_1547142, encodes 16S rRNA
  source 1..490: mol_type = genomic DNA
agagtttgatcatggctcaggatgaacgctagcggcaggcttaacacatgcaagttgagcgggaactgagggtagcttgctacttgaggggagagcagcgcactggtgagtaacacgtgggaacataccttttggtgggggacaacagttggaaacgactgctaataccgcataagccctaagggggaaagattaattgccgaaagattggcccgcggaagattaggtagtaggtggggtaacggcctacctagccgacgatctatagctggtctgagaggacgatcagccacattggaactgagacacggtccagactcctacgggaggcagcagtgaggaatattgggcaatgggcggaagcctgaaccagccaagtagcgtgcaggatgactgccctatgggttgtaaactgcttttatacggggataaagtcagagtcgtgactctgtttgcaggtaccgtatgaataaggaccggctaattccgt

SEQ ID NO: 9281 - DNA, 490 bp, unidentified
  misc_feature 1..490: note = Ascusbbf_1593581, encodes 16S rRNA
  source 1..490: mol_type = genomic DNA
agagtttgatcctggctcagaacgaacgctggcggcatggattaggcatgcaagtcgaacgccggtagcaataccggagtggcgcaagggtgaggaacgcgtgagtgatctgccctcaagttgggaatagctcctggaaacgggaattaataccgaatgtgatcatagagctgcatggttttatgattaaaggcgaaagtcgcttgaggaggagctcgcgtcccattagctagttggtgaggtaacggcccaccaaggcaatgatgggtagctggtctgagaggacgaccagccacactgggactgagaactacccagactcctacgggaggctgcagtcgagaattttgggcaatgggcgaaagcctgacccagcaatgccgcgtgcgggatgaaggtcttcggattgtaaaccgctgtcgagggggacgaaatttgacggtacccctagaggaagccacggctaactacgtgccagcagccgcggtaa

SEQ ID NO: 9282 - DNA, 482 bp, unidentified
  misc_feature 1..482: note = Ascusbbf_1399942, encodes 16S rRNA
  source 1..482: mol_type = genomic DNA
agagtttgatcatggctcagaacgaacgctggcggcacgcctaacacatgcaagtcgaacgggacttatgccttcgggtgtaagtttagtggcggacgggtgagtaacgcgtgggaacctgccctgcagtaaggaataacttcgggaaaccgaagctaataccgtatacgcccttcgggggaaagattcatcgctgtaggatgggcccgcgtaagattagctagttggtgaggtaatggctcaccaaggctatgatctttagctggtctgagaggatggccagccacactgggactgagacacggcccagactcctacgggaggcagcagtggggaatattggacaatgggggcaaccctgatccagcgatgccgcgtgagtgaagaaggccttcgggttgtaaaactctttcacctgtgacgatgatgacggtagcaggagaagaagcaccggctaactccgtgccagcagccgcggtaat

SEQ ID NO: 9283 - DNA, 490 bp, unidentified
  misc_feature 1..490: note = Ascusbbf_519094, encodes 16S rRNA
  source 1..490: mol_type = genomic DNA
agagtttgatcctggctcaggacgaacgctggcggcgtgcctaaaacatgcaagtcgaacgaggtccatccggtggcaacaccggggacgacctagtggcgaacgggtgagtaacacgtgaggaacctgccccgaagaccgggataactcgaggaaactcgggctaataccggatacccccaccaggccgcatggccaggtgaggaaatgcattgtgcttcgggagggcctcgcggcctatcagcttgttggtggggtaacggcccaccaaggcgtcgacgggtagctggtctgagaggacgatcagccacactgggactgagacacggcccagactcctgcgggaggcagcagttaggaatcttgcgcaatgggcgaaagcctgacgcagcaacgccgcgtgggggatgaaggccttcgggttgtaaacccctttcagtagggacgaaaatgacggtacctacagaagaagccccggccaactacgtgc

SEQ ID NO: 9284 - DNA, 490 bp, unidentified
  misc_feature 1..490: note = Ascusbbf_1740384, encodes 16S rRNA
  source 1..490: mol_type = genomic DNA
agagtttgatcctggctcagaacgaacgctggcggcaggcctaacacatgcaagtcgagcgtgaaaggggcttcggccctgagtaaagcggcgcacgggtgagtaacacgtgaataatctgcccttctgaccgggataacagaccgaaaggactgctaataccggataagcccccgcaccaaccgggtgtgtgggaaaagtacgggaccttcgggccgtatgcggaaggatgagttcgcgttccattagatagttggtgaggtaacggctcaccaagtcgacgatggatagctggtctgagaggatgatcagccacactggaactgagacacggtccagactcctacgggaggcagcagtggggaatcttgcgcaatgggggaaaccctgacgcagccatgccgcgtgagtgatgaaggccttcgggttgtaaagctctgtctaaggggacgaatggcacacggaacaagacaccgtgtgcgtgacggta

SEQ ID NO: 9285 - DNA, 490 bp, unidentified
  misc_feature 1..490: note = Ascusbbf_1420934, encodes 16S rRNA
  source 1..490: mol_type = genomic DNA
agagtttgatcctggctcaggacgaacgctggcggcacgcctaacacatgcaagtcgaacggagaatgtagcttgctacattcttagtggcggacgggtgagtaacacgtgaggaacctgcctttctgagggggataacgtttggaaacgaacgctaataccgcataacatacaactgtcgcatggcagatgtatcaaaggagcaatccgcagaaagatggcctcgcgtctgattagctagttggtaaggtaatggcttaccaaggcaacgatcagtagccggactgagaggttgaacggccacattgggactgagacacggcccagactcctacgggaggcagcagtggggaatattgcacaatgggcgcaagcctgatgcagcgatgccgcgtgagggaagaaggttttcggattgtaaacctctgttctaagggacgataatgacggtaccttagtagaaagctccggctaactacgtgccagcagc

SEQ ID NO: 9286 - DNA, 490 bp, unidentified
  misc_feature 1..490: note = Ascusbbf_1255249, encodes 16S rRNA
  source 1..490: mol_type = genomic DNA
agagtttgatcctggctcaggatgaacgctagcgacaggcctaacacatgcaagtcgaggggtagcaggatgtagcaatacattgctgacgaccggcgcacgggtgagtaacacgtatgcaacctaccttctacaggggaatagcccggagaaattcggattaataccccataacacagggataccgcatggtaatatttgttaaagatttatcggtagaagatgggcatgcgttccattagccagttggtgaggtaacggctcaccaaagcaacgatggataggggaactgagaggtttatcccccacactggtactgagacacggaccagactcctacgggaggcagcagtgaggaatattggtcaatggacgagagtctgaaccagccaagtcgcgtgaaggatgacggccctacgggttgtaaacttcttttgtatgggagtaaaaaagactacgcgtagtctattgcaagtaccatacgaataag

SEQ ID NO: 9287 - DNA, 490 bp, unidentified
  misc_feature 1..490: note = Ascusbbf_1815937, encodes 16S rRNA
  source 1..490: mol_type = genomic DNA
agagtttgatcatggctcaggatgaacgctagcggcaggcctaacacatgcaagtcgaggggtatataatgcttgcattatagagaccggcgcacgggtgcgaaacgcgtatgcaatctaccttatacaaggggatagcccgaagaaatttggattaataccctatagaatcaccgacaggcatctgttaatgattaaagatttattggtataagatgagcatgcgtcctattagctagttggtgtggtaacggcacaccaaggcaacgataggtaggggtcctgagagggagatcccccacactggtactgagacacggaccagactcctacgggaggcagcagtgaggaatattggacaatgggcggaagcctgatccagccatgccgcgtgcaggaagactgccctatgggttgtaaactgcttttctacgggaagaaaccctccgacgtgtcggagcttgacggtaccgtaagaataaggatcggc

SEQ ID NO: 9288 - DNA, 490 bp, unidentified
  misc_feature 1..490: note = Ascusbbf_1747239, encodes 16S rRNA
  source 1..490: mol_type = genomic DNA
agatttgatcctggctcaggatgaacgctggcggcgtgcctaacacatgcaagtcgaacggagattattaggaacagagcacttgtgctctgggaatagtaattttagtggcggacgggtgagtaacacgtgagcaacctgccttggtcagggggataacaacgggaaaccgttgctaataccgcatgaaatatttttacggcatcgtatagatatcaaaggagcaatccggactaagatgggctcgcgtccgattagttagttggtggggtaatggcctaccaagaccgcgatcggtagccggactgagaggttgaccggccacattgggactgagacacggcccagactcctacgggaggcagcagtggggaatattgggcaatgggggcaaccctgacccagcgacgccgcgtgaaggatgaaggccttcgggttgtaaacttctttgatcggggacgataatgacggtacccgaggaacaagccac

SEQ ID NO: 9289 - DNA, 490 bp, unidentified
  misc_feature 1..490: note = Ascusbbf_1149990, encodes 16S rRNA
  source 1..490: mol_type = genomic DNA
agagtttgatcctggctcaggacgaacgctggcggcgtgcctaacacatgcaagtcgagcggagccaatcatcagatcccttcggggtgacgaggaggaagcttagcggcggacgggtgagtaacgcgtgagtaacctgcccataagagggggataacacagagaaatttgtgctaataccgcatattgagtattaaccgcatgattgatacttgaaagatttatcgcttatggatggactcgcgtctgattagctagttggcggggtaacggcccaccaaggcgacgatcagtagccgaactgagaggttgatcggccacattgggactgagacacggcccagactcctacgggaggcagcagtggggaatattgcgcaatgggggaaaccctgacgcagcaacgccgcgtgaaggaagaaggccttcgggttgtaaacttttgtcgcaagggaagaagacagtgacggtaccttgtgagaaagccacg

SEQ ID NO: 9290 - DNA, 472 bp, unidentified
  misc_feature 1..472: note = Ascusbbf_1064162, encodes 16S rRNA
  source 1..472: mol_type = genomic DNA
agagtttgatcatggctcagaacgaacgctggcggcaggcctaacacatgcaagtcgaacgctcgtagcactacgggagtggcgcacgggtgagtaacgcgtgggcacctgcccggtggtttgggataaccgtgggaaactgcggctaataccggatacgcccctagggggaaagatttatcgccatcggatgggcccgcgtaggattagctagttggtgaggtaacggctcaccaaggcgacgatccttagctggtctgagaggatgatcagccacactgggactgagacacggcccagactcctacgggaggcagcagtggggaatattggacaatgggggcaaccctgatccagccatgccgcgtgagtgaagaaggccttcgggttgtaaagctcttttggcggggacgatgatgacggtacccgcagaataagccccggctaacttcgtgccagcagccgcggtaat

SEQ ID NO: 9291 - DNA, 490 bp, unidentified
  misc_feature 1..490: note = Ascusbbf_392771, encodes 16S rRNA
  source 1..490: mol_type = genomic DNA
agagtttgatcatggctcaggatgaacgctagctacaggcttaacacatgcaagtcgaggggcagcatgatcgaagcttgctttgattgatggcgaccggcgcacgggtgagtaacgcgtatccaaccttccctatactagaggatagcccggcgaaagtcggattaatactctatgttgtatttagaagacatctgaagaataccaaagattcatcggtataggatgggtctgcgtctgattagctggttggcggggtaagagcccaccaaggcgacgatcagtagccggtctgagaggatgaacggccacattggaactgagacacggtccagactcctacgggaggcagcagtggggaatcttccgcaatgggcgaaagcctgacggagcaacgccgcgtgagtgaagaaggtcttcggatcgtaaagctctgtcgaaggggacgaacgtagtttttgtgaataatgagagctaatgacggtacctt

SEQ ID NO: 9292 - DNA, 490 bp, unidentified
  misc_feature 1..490: note = Ascusbbf_1476274, encodes 16S rRNA
  source 1..490: mol_type = genomic DNA
agagtttgatcatggctcaggacgaacgctggcggcgtgcttaacacatgcaagtcgagcggaaaggccccttcgggggtactcgagcggcgaacgggtgagtaacacgtgggtaacctgccctcagcttcgggataagcccgggaaactgggtctaataccggatgtgacacatgaccgcatggtctgtgtgtggaaagatttatcggctgaggatggactcgcggcctatcagcttgttggtggggtaatggcctaccaaggcgaagacgggtagccggcctgagagggtgaccggccacactgggactgagacacggcccagactcccacgggaggcagcagtggggaatattgcgcaatgggcgaaagcctgacgcagcaacgccgcgtgagggatgacggccttcgggttgtaaacctctttcagcgctgacgaagctttcgggtgacggtaagcgcagaagaagcaccggctaactacgtgcca

SEQ ID NO: 9293 - DNA, 490 bp, unidentified
  misc_feature 1..490: note = Ascusbbf_1770152, encodes 16S rRNA
  source 1..490: mol_type = genomic DNA
agagtttgatcatggctcaggacgaacgctggcggcgggcttaacacacgcaagtcgaacgagaatcccggggcttgccccgggaggacagtggcgcacgggtgagtaacgcgtaggcaacctaccctcagctggggaataaccaggggaaaccctggctaataccccataacgtcccgacagggcatcctgtcgggatcaaagccctggcggctgaggatgggcctacgttggattagcttgttggtggggtaacggcccaccaaggcaacgatccatagcgggtctgagaggatgatccgccacactggcactgagacacgggccagactcctacgggaggcagcagtgaggaatattgcgcaatggacgaaagtctgacgcagccacgccgcgtgcaggaagacacccctcaggggcgtaaactgcttttatacgggaagaacaccctactcggtagggtctgacggtaccgtacgaataaggaccg

SEQ ID NO: 9294 - DNA, 470 bp, unidentified
  misc_feature 1..470: note = Ascusbbf_818115, encodes 16S rRNA
  source 1..470: mol_type = genomic DNA
agagtttgatcctggctcagaatgaacgctggcggcaggcctaaaacatgcaagtcgaacgctgtagcaatacagagtggcgcacgggtgagtaacatgtgggaatatgccttttggtacggaacaacagttggaaacgactgctaataccgtatggtcccttcggggtaaagatttatcgccaaaagattagcccgcactggattagctagttggtaaggtaatggcttaccaaggcgacgatccatagctggtttgagaggacgatcagccacactgggactgagacacggcccagactcctacgggaggcagcagttaggaatattggacaatgggcgcaagcctgatccagccatgccgcgtgaacgatgaaggccttcgggttgtaaagttctttagccgatgattataatgactgtagtcggaaaataagccccggctaacttcgtgccagcagccgcggtaat

SEQ ID NO: 9295 - DNA, 490 bp, unidentified
  misc_feature 1..490: note = Ascusbbf_1324228, encodes 16S rRNA
  source 1..490: mol_type = genomic DNA
agagtttgatcatggctcaggatgaacgctagcggcaggcttaacacatgcaagtcgaggggcagcgcggggtagcaatactctggcggcgaccggcggaagggtgcgtaacgcgtgagcaacttgcccgtcactgggggataggcactggaaacggtgtgtaataccccataatatatggattcacatggattcatattgaaagattcgttggtgacggatgggctcgcgtaacattagctagtcggcggggtagcggccccccgcggctacgatgtttaggggttctgggaggaaggtcaccaacactgaaccggagaaacggtccagactcgaacgggaggcagcagtgaggaaaattggtcaatgggcagaagcctgaaccagccatgccgcgggcaggaataaggccctatgggtcgtaaactgcttttccttgagggcaataagggtcacgtgtggcccgatgagagtatcaggggaataagca

SEQ ID NO: 9296 - DNA, 490 bp, unidentified
  misc_feature 1..490: note = Ascusbbf_1424594, encodes 16S rRNA
  source 1..490: mol_type = genomic DNA
agagtttgatcatggctcaggatcaacgctggcggcgtgcctaatgcatgcaagtcgaacggggttctcttcggaggactcatgtgggggacgggtgaggaacacgtggccaatctgcccactggcagggggtagccggcggaaacgccgggtaattccgtatacgcttgtccttcgagtgggaaggataaggaaaggggcaacccgccggtggaggaggctgcggccgattagctagttggtggggtaatggcctaccaaggcgatgatcggtagctggtctgagaggacgatcagccacacggggactgagacacggccccgactcctacgggaggcagcagcaaggaattttccgcaatgggcgaaagcctgacggagcaacgccgcgtgcgggatgacgcgtttcggcgtgtaaaccgctgttcgtggggacgaagcactgacggtacccacggaggaaggcccggctaactacgtgccagcagcc

SEQ ID NO: 9297 - DNA, 490 bp, unidentified
  misc_feature 1..490: note = Ascusbbf_1593942, encodes 16S rRNA
  source 1..490: mol_type = genomic DNA
agagtttgatcctggctcaggatgaatgctggcggcgtgcctaacacatgcaagtcgagcggtaacatgctttgcactatcgttttcttatcttaggatgatgtttaaatatttaaatttagacctaggtatcaaaggaagcgggagtgcaaagtgatgacgagcggcggacggctgagtaacgcgtgggaatctgccccaaagtgaggaataactgcccgaaagggtggctaataccgcatatggtcttcggattaaaggatttatccgctttgggaggagcccgcgttagattaggttgttggtagggtaatggcctaccaagcctacgatctatagctggtctgagaggatgatcagccagactgggactgagacacggcccagactcctacgggaggcagcagtgaggaatcttccacaatgggcgaaagcctgatggagcaacgccgcgtgaaggatgaaggccttagggttgtaaacttctttt

SEQ ID NO: 9298 - DNA, 490 bp, unidentified
  misc_feature 1..490: note = Ascusbbf_1497048, encodes 16S rRNA
  source 1..490: mol_type = genomic DNA
agagtttgatcctggctcaggattaacgctggcggcgtgcctaatgcatgcaagtcgaacgtggtcccttcgggggcaaacgtggcggacgggtgaggaacacgtggggaacctgcccatcggtggggggtagcccgcggaaacgcggggtaattccgcatacgctcgcttcggggtagccgaggtgaggaaagggtcttcggactcgccgatggaggggcctgcgtccgattagctagttggtggggtaacggcctaccaaggcggtgatcggtagctggtctgagaggacggccagccacaggggaactgagacacggtccccactcctacgggaggcagcagcaaggagttttccgcaatgggcgaaagcctgacggagcaacgccgcgtgggggatgacacctttcggggcgtaaaccccttttcttggggacgaagcagtgacggtacccgaggaagaaggcccggctaactacgtgccagcagc

SEQ ID NO: 9299 - DNA, 490 bp, unidentified
  misc_feature 1..490: note = Ascusbbf_1377244, encodes 16S rRNA
  source 1..490: mol_type = genomic DNA
agagtttgatcctggctcaggatgaacgctagcgataggcctaacacatgcaagtcgaggggcagcacatgaagtagcaatacggatggtggcgaccggcgcacgggtgagtaacgcgtatgcaatctacctacaacaagggaataacccgttgaaagacggactaataccctataaaacaggggtcccgcatgggaatatttgttaaagatttatcggttgtagatgagcattcgttccattagcttgttgtagaggtaacggcccaccacggcaacgatggataggggaactgcgaggtagctcccactcactgagactgcgacaagaaccagactcctacgggaggcagcagtgaggaatattgggcaatggacgcaagtctgaaccagccacgtcgcgtgaaggaagacggccctacgggttgtaaacttcttttgtaagggaataaagtgagtcacgtgtgactttttgcatgtaccttacgaat

SEQ ID NO: 9300 - DNA, 490 bp, unidentified
  misc_feature 1..490: note = Ascusbbf_1346970, encodes 16S rRNA
  source 1..490: mol_type = genomic DNA
agagtttgatctggctcaggataaacgctggcggcgcacataagacatgcaagtcgaacgaacttaatcgaaagtttacttttgaagcggttagtggcggactggtgagtaacgcgtaagcaatctgcctatcagaggggaataacagtgagaaatcattgctaataccgcataagctgtgagtatcgcatgatacaaatagaaaaggagcaatccgctgatagatgagcttgcgtctgattagttagttggtggggtaacggcctaccaagacgatgatcagtagccggactgagaggttaaacggcaggattgggactgagatagagcccagactcatacgggagggaggaggcaggaagattgcgcgaaggaggaaactctgacgcagggacgccgcgtgcaggaagaaggttgtcggattgtaaactgctttagatagggaagaaaaaaaatgacggtacctatagaataagctccggctaactac

SEQ ID NO: 9301 - DNA, 490 bp, unidentified
  misc_feature 1..490: note = Ascusbbf_1325008, encodes 16S rRNA
  source 1..490: mol_type = genomic DNA
agagtttgatcctggctcaggataaacgctggcggcgcacataagacatgcaagtcgaacggacttaactcattcttaacgattgagagcggttagtggcggactggtgagtaatgtataagtaacctgcctatcagaggggaacaacagttggaaacgactgctaataccgcatatgccacgagaatcacatggttcaagtgggaaaggagcaatccgctgatagatggatttatatctgattagctagctggtggggtaacggcctaccaaggcgacgttcagtagccggactgggaggttaaacgacgacattgggactgagatacggcacagactcgtacgggaggcagcagtcgggaagattgcgcaatggaggaaacgcggacgcagagacgccgcgggcaggaagaaggttttcggattgtaaaaggctttagacagggaagaaaaaagacagtacctgtagaataagctccggctaactacg

SEQ ID NO: 9302 - DNA, 490 bp, unidentified
  misc_feature 1..490: note = Ascusbbf_960112, encodes 16S rRNA
  source 1..490: mol_type = genomic DNA
agagtttgatcctggctcaggatgaacgctagcggcaggcttaacacatgcaactcgaggggcagcggggagtagcaatactttgccggcgaccggcggacgggtgcgtaacgcgtatgcaacctacctattaccgggggataagctggagaaattcggtctaacaccgcgtaatacgagataaggcatcttattttgttgaaatggttaaggtaatagatgggcatgcgtgacattagctagttggtagggtaacggcctaccaaggcgacgatgtctagggggactgagaggttaaccccccacactggtactgagacacggaccagactcctacgggaggcagcagtgaggaatattggtcaatgggcggaagcctgaaccaaccatgccgcgtgcaggaaggaggctctaagagttgtaaactgcttttgtacgagggtaacagcgggtacgcgtacctgtatgaaagtatcgtacgaataaggat

SEQ ID NO: 9303 - DNA, 165 bp, unidentified
  misc_feature 1..165: note = Ascusbbf_1307, encodes 16S rRNA
  source 1..165: mol_type = genomic DNA
agagtttgatcctggctcaggatgaacgctagcggcaggcttaactccgtgccagcagccgcggtaatacggaggatgcgagcgttatccggattcaagagtttgatcctggctcaggatgaacgctagcggcaggcttaactccgtgccagcagccgcggtaat

SEQ ID NO: 9304 - DNA, 487 bp, unidentified
  misc_feature 1..487: note = Ascusbbf_29114, encodes 16S rRNA
  source 1..487: mol_type = genomic DNA
agagtttgatcatggctcagaacgaacgctggcggcaggcttaacacatgcaagttgaacggtattgttgagtagcttgctatttaacaagagagtagcgcactggtgagtaacacgtgggaacgtgccttgaagtgggggacaacagagggaaacttctgctaataccgcatacgccctgagggggaaagatttattgcttcaagatcggcccgcggaagattaggcagttggtggggtaaaggcctaccaaacctacgatctatagctggtctgagaggacgatcagccacattggaactgagacacggtccagactcctacgggaggcagcagtgaggaatattgggcaatggagggaactctgacccagccatgccgcgtgagtgagaaggtcttcggattgtaaagctctttcggatgggacgatgatgacggtaccatctaaagaagccccggcaaacttcgtgccagcagccgcggtaat

SEQ ID NO: 9305 - DNA, 482 bp, unidentified
  misc_feature 1..482: note = Ascusbbf_44032, encodes 16S rRNA
  source 1..482: mol_type = genomic DNA
agagtttgatcatggctcagaacgaacgctggcggcacgcttaacacatgcaagtcgaacggggtatatgggcttgctcatatacttagtggcggacgggtgagtaacacgtgggaacatatcctgtagtggtggatagctctgggaaactggaggtaatacagcataagctcgagagaggaaagatttattgctataggggtggcctgcggctgattaggtagttggtaaggtaaaggcttaccaagccgaggatcagtagctggtctgagaggacgaacagccacactgaaactgagaaacggttcagactcctacgggaggcagcagtggggaatattggacaatgggggcaaccctgatccagcgatgccgcgtgagtgaagaaggtcttaggattgtaaagctcttttgacagggaagatgatgacggtacctgtagaataagcaccggctaactctgtgccagcagccgcggtaat

SEQ ID NO: 9306 - DNA, 490 bp, unidentified
  misc_feature 1..490: note = Ascusbbf_137609, encodes 16S rRNA
  source 1..490: mol_type = genomic DNA
agagtttgatcctggctcaggactaacgctggcggtgtgcttcatacatgcaagtcgagcggggttggtagcaatactaacttagcggcggacgggtgcgtaacgcgtgaataatctgcctctttctggggaataacagcaagaaattgttgctaataccgcatatgaccacagttcggcatcgaacaggggtgaaagatttatcggaaagagatgagttcgcgtactattagctagttggtgaggtaatggcccaccaaggcaacgatagttagccggcctgagagggtgaacggccacactggaactgagacacggtccagactcctacgggaggcagcagtagggaatattgggcaatggaggcaactctgacccagcaacaccgcgtgaaggaagaaggtcttcggattgtaaacatctgttgtgagagaaaaagaaaacgatggtatctcacgagaaagcaccggcaaactatgtgccagcagcc

SEQ ID NO: 9307 - DNA, 490 bp, unidentified
  misc_feature 1..490: note = Ascusbbf_468522, encodes 16S rRNA
  source 1..490: mol_type = genomic DNA
agagtttgatcctggctcaggacgaacgctggcggcgtgcctaatacatgcaagtcgagcggacttgatgaggagcttgctcctctgagagttagcggcggacgggtgagtaacacgtaggcaacctgccctcaagactgggataactaccggaaacggtagctaataccggataattcacgctgctgcatggcagtgtgatgaaaggcggagcaatctgtcacttgaggatgggcctgcggcgcattagctagttggtggggtaacggcctaccaaggcgacgatgcgtagccgacctgagagggtgatcggccacactgggactgagacacggcccagactcctacgggaggcagcagtagggaatcttccgcaatgggcgaaagcctgacggagcaacgccgcgtgagtgatgaaggttttcggatcgtaaagctctgttgccagggaagaacgtccttaagagtaactgcttaaggagtgacggta

SEQ ID NO: 9308 - DNA, 490 bp, unidentified
  misc_feature 1..490: note = Ascusbbf_231232, encodes 16S rRNA
  source 1..490: mol_type = genomic DNA
agagtttgatcatggctcaggatgaacgctggcggcgtgcttaacacatgcaagtcgaacggagttaggcgctggtctgatggcagcttgctgcaggatttccttgcttaacttagtggcggacgggtgagtaacgcgtgagtaacctgcccttgagtggggaataacgttctgaaaagaacgctaataccgcataacacatatttgccgcatgacagatacgtcaaagatttatcgctcaaggatggactcgcgtccgattagcttgttggtgaggtaacggctcaccaaggcgacgatcggtagccggactgagaggttgaacggccacattgggactgagacacggcccagactcctacgggaggcagcagtgggggatattgcgcaatgggggaaaccctgacgcagcaacgccgcgtggaggatgacggttttcggattgtaaactccttttatgggggacgaaataagacggtaccccatgaat

SEQ ID NO: 9309 - DNA, 490 bp, unidentified
  misc_feature 1..490: note = Ascusbbf_713368, encodes 16S rRNA
  source 1..490: mol_type = genomic DNA
agagtttgatcatggctcagattgaacgctggcggcaggcttaacacatgcaagtcgagcggtagcacagagaagcttgcttcttgggtgacgagcggcggacgggtgagtaatacataggaatctgcctggtagtgggggacaacagttggaaacgactgctaataccgcatacgccctacgggggaaagcaggggatcttcggaccttgcgctatcagatgagcctatgtcggattagcttgttggtgaggtaaaggctcaccaaggcgacgatccgtagctggtctgagaggatgatcagccacactgggactgagacacggcccagactcctacgggaggcagcagtggggaatattggacaatgggcgcaagcctgatccagccatgccgcgtgtgtgaagaaggccttcgggttgtaaagcactttcagttgggaggaaggcctgtaagctaataccttgcaggattgacgttaccaacagaag

SEQ ID NO: 9310 - DNA, 490 bp, unidentified
  misc_feature 1..490: note = Ascusbbf_549953, encodes 16S rRNA
  source 1..490: mol_type = genomic DNA
agagtttgatcctggctcaggacgaacgctggcggcgcgcctaacacatgcaagtcgaacggagttgcgacgacagatcccttcggggtgacgttatcgtaacttagtggcgaacgggtgagtaacacgtgagtaacctgcctttcagagggggacaacagttggaaacgactgctaataccgcataagaccacagtacggcatcgtacaggggtcaaaggagcaatccgctgaaagatggactcgcgtccaattagctggttggtgaggtaacggcccaccaaggcgacgattggtagccggactgagaggttgaacggccacattgggactgagacacggcccagactcctacgggaggcagcagtggggaatattgcacaatggaggaaactctgatgcagcgacgccgcgtgagggaagaaggtcttcggattgtaaacctctgtcttcagggacgataatgacggtacctgaggaggaagccacg

SEQ ID NO: 9311 - DNA, 490 bp, unidentified
  misc_feature 1..490: note = Ascusbbf_135829, encodes 16S rRNA
  source 1..490: mol_type = genomic DNA
agagtttgatcctggctcagattgaacgctggcggcatgctttacacatgcaagtcgaacggcagcacgggtgcttgcacctggtggcgagtggcgaacgggtgagtaatgcatcggaacgtacctatcagtgggggataacacatcgaaagatgtgctaataccgcatattatccgaggatgaaagcgggggaccttagggcctcgcgctgatagagcggccgatgtcggattagctagttggtgaggtaaaggctcaccaaggcgacgatccgtagcgggtctgagaggatgatccgccacactgggactgagacacggcccagactcctacgggaggcagcagtggggaattttggacaatgggcgaaagcctgatccagccatgccgcgtgagtgaagaaggccttcgggttgtaaagctcttttgtccgggaggaaatcctgacccctaatacgggtcggggatgacagtactggaagaataagc

SEQ ID NO: 9312 - DNA, 490 bp, unidentified
  misc_feature 1..490: note = Ascusbbf_722558, encodes 16S rRNA
  source 1..490: mol_type = genomic DNA
agagtttgatcctggctcagaatgaacgctggcggcatggattaggcatgcaagtcgaacgagaaagcgtcttcgggcgcgagtaaagtggcgaaagggtgagtaacacgtgaggaacctgccccccagtccggaacaatcctgtgaaaacgggcctgaaaccggatgccggcccactccgcatggagtggagccgaaacatttatggctggaggatggcctcgcgtcccattagcttgttggcggggtatcggcccaccaaggctacgacgggtaggtggtctgagaggatggtcacccacactgggactgagacactgcccagactcctacgggaggctgcagtcgagaatcttccgcaatgggcgcaagcctgacggagcgatgccgcgtgagggaagtaggccttcgggtcgtgaacctctgtcgacggggacgaacgcaatgacggtacccgtcaagaaagccacggctaaccacgtgccagcag

SEQ ID NO: 9313 - DNA, 490 bp, unidentified
  misc_feature 1..490: note = Ascusbbf_75597, encodes 16S rRNA
  source 1..490: mol_type = genomic DNA
agagtttgatcatggctcaggacgaacgctggcggcgtgcctaacacatgcaagtcgaacgaacgaggtagcaatactgagttagtggcggacgggtgagtaatgcatgagcaacctacctcatacagggggatagcacttagaaatgagtggtaataccgcataataaccatacatggcatcatgtaaggaggaaaggaggaatccggtaagagatgggctcatgttcgattagctagttggtgaggtaaaggcttaccaaggcgacgatcgatagccgaactgagaggttgaacggccacattggaactgagatacggtccagactcctacgggaggcagcagtgggggatattgcgcaatggggggaaccctgacgcagcaacgccgtgtgaaggaagaaggctttcgggttgtaaacttctttgattagggacgaaagagatgacggtacctaaggaacaagccacggctaactacgtgccagcag

SEQ ID NO: 9314 - DNA, 490 bp, unidentified
  misc_feature 1..490: note = Ascusbbf_430932, encodes 16S rRNA
  source 1..490: mol_type = genomic DNA
agagtttgatcatggctcaggatgaacgctggcggcgtgcctaacacatgcaagtcgaacgaagcactggtgcggaagccctcgggtggaagcacctctgactgagtggcggacgggtgagtaacgcgtgggaaacctgccctatacagggggataacggcgggaaactgctgttaataccgcataagcgcacaagggccgcatggcccggtgtgaaaagctccggtggtataggatggtcccgcgtctgattagctggttggcggggtaacggcccaccaaggcgacgatcagtagccggcctgagagggcgaccggccacattgggactgagacacggcccagactcctacgggaggcagcagtggggaatattgcacaatgggggaaaccctgatgcagcgacgccgcgtgagtgacgaagtatctcggtatgtaaagctctatcggcaggggagaaattgacggtacctgactaagaagccccggc

SEQ ID NO: 9315 - DNA, 490 bp, unidentified
  misc_feature 1..490: note = Ascusbbf_1565747, encodes 16S rRNA
  source 1..490: mol_type = genomic DNA
agagtttgatcatggctcaggacgaacgctggcggcgtgcctaacacatgcaagtcgaacggaagttagagcttcggttttaactttagtggcgaacgggtgagtaacgcgtgaagaacctgcctttcagtgggggacaacagttggaaacgactgctaataccgcatgaaacttcgagagggcatcctcttgaagtcaaagctttatgtgctgaaagatggcttcgcgtctgattagctagttggtggggtaacggcccaccaaggcgacgatcagtagccggtctgagaggatgaacggccacattgggactgagatacggcccagactcctacgggaggcagcagtggggaatattgggcaatgggggaaaccctgacccagcaacgccgcgtgaaggaagaaggccttcgggttgtaaacttcttttagcagggacgaaggacgtgacggtacctgcagaaaaagcaacggctaactacgtgccag

SEQ ID NO: 9316 - DNA, 490 bp, unidentified
  misc_feature 1..490: note = Ascusbbf_649620, encodes 16S rRNA
  source 1..490: mol_type = genomic DNA
agagtttgatcatggctcaggacgaacgctggcggcatgcttaacacatgcaagtcgaacgggttaaatttgctatagcgatataggagatttaatttagtggcgaacgggtgagtaacgcgtgagcaacctgccgtacacactgggataacagagggaaacttctgctaataccggatatgaccacgaaggggcatccctttggggtgaaagtgctttagcggtgtacgatgggctcgcgtcctattaggtagttggtgagataacagcccaccaagccgatgataggtagccgacttgagagagtgatcggccacaatggaactgagacacggtccatactcctacgggaggcagcagtggggaatattgggcaatgggcgcaagccttacccagcaatgccgcgtgaatgattgaaggtcttcggattgtaaagttcttttattggtgacgaaatctgacggtagccgatgaataagccccggctaa

SEQ ID NO: 9317 - DNA, 490 bp, unidentified
  misc_feature 1..490: note = Ascusbbf_1512747, encodes 16S rRNA
  source 1..490: mol_type = genomic DNA
agagtttgatcatggctcagattgaacgctggcggcgtgcctaacacatgcaagtcgagcggtaacaggtgtagcaatacatgctgacgagcggcggacgggtgagtaacgcttgggaatctgcctatcagtgggggacaacccggggaaactcgggctaataccgcatacgatctacggatgaaagccggggaccgcaaggcctggcgctgatagatgagcccaagtcggattagctagttggtagggtaatggcctaccaaggcgacgatccgtaactggtctgagaggacgaccagtcaaaccggaactgagacacggtccggactcctacgggaggcagcagtggggaatattggacaatgggggcaaccctgatccagcgacgccgcgtgggtgaagaaggcctgcgggttgtaaagccctttcggttgggaagaaaagttgcgacctaacacgttgtgaccttgacgtaaccaactaaagaagc

SEQ ID NO: 9318 - DNA, 490 bp, unidentified
  misc_feature 1..490: note = Ascusbbf_280400, encodes 16S rRNA
  source 1..490: mol_type = genomic DNA
agagtttgatcatggctcaggatgaacgctggcggcatgcctaagacatgcaagtcgaacgaagaagcccaatgaagattgagtgcttgcacgagattggaactggatacttcttagtggcagacgggtgagtaacacgtgggtaatctacctcagagactgggataacgtttggaaacgaacgctaataccggataaatcatatttggataaccagatatgctaaaaggagctacggcttcgctttgagatgagcttgcggtgtattagctagttggtgaggtaatggctcaccaaggcaacgatgcatatccgagctgagaggctgatcggacacactgggactgagacacggcccagactcctacgggagacagcagttaggaatattcgtcaatggaggaaactctgaacgagcaatgccgcgtgagtgatgaaggtcttacagattgtaaaactctgttgtaaaggaagaaatcttattataggg

SEQ ID NO: 9319 - DNA, 242 bp, unidentified
  misc_feature 1..242: note = Ascusbbf_1734912, encodes 16S rRNA
  source 1..242: mol_type = genomic DNA
agagtttgatcatggctcaggacgaacgctggcggtatgcttaacacatgcaagtcgaacgagaagcttcttaatgatccttcgggagatttaagaagtggatagtggcgaacgggtgagtaacgcgtgggcaacctgcctttcggagcggaatagcctcgggaaaccgggagtaaagccgcataacattattttttcgcatgaagaaataatcaaaactccgtgccagcagccgcggtaat

SEQ ID NO: 9320 - DNA, 490 bp, unidentified
  misc_feature 1..490: note = Ascusbbf_660999, encodes 16S rRNA
  source 1..490: mol_type = genomic DNA
agagtttgatcatggctcagaacgaacgctggcagcgtggattaggcatgcaagtcgaacgggatcgcttggatagcaatattcgggcgtgagagtggcggattggggaggagcacgtgagcaacctgccctggagatgtggaaaacctctggaaacggaggctaatacagaatgtggcgccccatggcatcatgggagcgccgaagggggccgcaaggctcccgctccgggatgggctcgcgcaccatcagctagttggcggggtaacggcccaccaaggcctacggttagctggtctgagaggatgaccagccccactgggactgagatactgcccagactcctacgggaggctgcagtcgaggatcattcgcaatggacggaagtctgacgatgcgacgctgcgtggaggatgaaggccttcgggtcgtaaactcctgtcatgagggaagaggcgagggaagctaataccttctttagttgactgta

SEQ ID NO: 9321 - DNA, 488 bp, unidentified
  misc_feature 1..488: note = Ascusbbf_499009, encodes 16S rRNA
  source 1..488: mol_type = genomic DNA
agagtttgatcatggctcagaacgaacgctggcggcaggcttaacacatgcaagttgaacgggattattgagtagcttgctatttgatatgagggtggcgcacgggtgagtaatacgtgggaacatacctagtagttcggaacaactgatggaaacgtcagctaataccggataagccctgagggggaaagatatatcgctattagaatggcccgcggcagattaggcagttggtggggtaaaggcctaccaaacctacgatctgtagctgatctgagaggacgatcagccacattggaactgagacacggtccggactcctacgggaggcagcagtgaggaatattgggcaatggaggaaactctgacccagccatgccgcgtgagtgaagaaggttttcggattgtaaagctctttcgggagagaagatgatgacggtatctccagaagaagccccggcaaacttcgtgccagcagccgcggtaat

SEQ ID NO: 9322 - DNA, 490 bp, unidentified
  misc_feature 1..490: note = Ascusbbf_427457, encodes 16S rRNA
  source 1..490: mol_type = genomic DNA
agagtttgatcatggctcaggatgaacgctagcggcaggcttaacacatgcaagtcgaggggcatcgcgggtagcaatacctggcggcgaccggcgaaagggtgagtaacgcgtgagcaacgtgcccgtggttgggggatagtcgatggaaacgtcgcgtaataccccgtaacacatggaatcgcatggttctatgttgaaagattcattgaccacggatcggctcgcgtgccattaggtagacggcggggtaacggcccaccgtgccgacgatggctaggggttctgagaggaaggtcccccacattggaactgagacacggtccagactcctacgggaggcagcagtgaggaatattggacaatggccggaaggctgatccagccatgccgcgtgcgggaggacggccctatgggttgtaaaccgcttttgcgagggagcaataagggtcacgagtggcccgatgagagtaccttacgaataagcatc

SEQ ID NO: 9323 - DNA, 490 bp, unidentified
  misc_feature 1..490: note = Ascusbbf_1484314, encodes 16S rRNA
  source 1..490: mol_type = genomic DNA
agagtttgatcatggctcaggacgaacgctggcggcgtgcctaacacatgcaagtcgaacggagttattgtgaatgaagatttcggttggattttacagtgacttagtggcggacgggtgagtaacgcgtgagtaacctgccgataagagggggataacgttttgaaaagaacgctaataccgcataatgtatttgaatcgcatggtttgaataccaaaggagcaatccgcttatcgatggactcgcgtccgattagctagttggcggggtaaaggcccaccaaggcgacgatcggtagccggactgagaggttgaacggccacattgggactgagacacggcccagactcctacgggaggcagcagtgggggatattgcgcaatgggggaaaccctgacgcagcaacgccgcgtgaaggacgaaggtcttcggattgtaaacttcttttgttaaggacgaagaaagtgacggtacttaacgaataagct

SEQ ID NO: 9324 - DNA, 490 bp, unidentified
  misc_feature 1..490: note = Ascusbbf_1489769, encodes 16S rRNA
  source 1..490: mol_type = genomic DNA
agagtttgatcatggctcaggatgaacgctggcggcgtgcgtaacacatgcaagttgagcgacgcaaacatggaagcagagatgtggaagtgtttaacggagcggcggacgggtgagtaagacatgagaagctgtccaacagagggggacaacgtctggaaacggacgctaataccccgtaggccgggaggttaaagcagagatgtgctgttggaggtgctcgtgacctatcagctagttggtgaggtaactgctctaccaaggcgacgacgggtagccggcctgagagggtgaacggccacactgggactgagatacggcccagactcctacgggaggcagcagtggggaatattgggcaatgggggagaccctgacccagcgacgccgcgtgaacgaagacggctttagggttgtaaagttcttttatgcgggaagaaggaagtgacggtaccgcatgaataagccccggctaactacgtgccagcag

SEQ ID NO: 9325 - DNA, 490 bp, unidentified
  misc_feature 1..490: note = Ascusbbf_928205, encodes 16S rRNA
  source 1..490: mol_type = genomic DNA
agagtttgatcatggctcagagtgaacgctggcggcgtggttaagacatgcaggtcgagcgggatttatcatcatgagtcttcggatgaatgaggatgatgagagcggcaaacgggtgcgtaacacgtaaacaacttgccctttggtccggaatagctcaccgaaaggtggattaatgccggatgtggttccctttcgcatgaaagagatactaaagcttgtaacggcgctaaaggagaggtttgcgtcctatcagcttgatggtgaggtaaaggcttaccatggctaagacgggtagctggtctgagaggatgatcagccacagtggaactgagatacggtccacacacctacgggtggcagcagtttcgagtcattcacaatgggcgaaagcctgatggtgcaacgccgcgtgggggatgaaggttctcgaatcgtaaacccctgtcgccgaggaacaaaatccgggttcgtagcccggcttgagtta

SEQ ID NO: 9326 - DNA, 468 bp, unidentified
  misc_feature 1..468: note = Ascusbbf_1787376, encodes 16S rRNA
  source 1..468: mol_type = genomic DNA
agagtttgatcatggctcagaacgaacgctggcggcaggcttaacacatgcaagtcgagcgccccgcaaggggagcggcagacgggtgagtaacgcgtgggaatctacccagtggtacgggacaacccagggaaacttggactaataccgtataagtccttcgggagaaagatttatcgccattggatgagcccgcgtcggattagctagttggtggggtaacggcctaccaaggcgacgatccgtagctggtctgagaggatgatcagccacactgggactgagacacggcccagactcctacgggaggcagcagtggggaatattggacaatgggcgcaagcctgatccagccatgccgcgtgagtgatgaaggccttagggttgtaaagctcttttggcggggacgataatgacggtacccgcagaataagccccggctaacttcgtgccagcagccgcggtaat

SEQ ID NO: 9327 - DNA, 490 bp, unidentified
  misc_feature 1..490: note = Ascusbbf_1709648, encodes 16S rRNA
  source 1..490: mol_type = genomic DNA
agagtttgatcctggctcaggacgaacgctggcggcgtgcctaatacatgcaagtcgagcggagtggatcgggagcttgctcctgatccacttagcggcggacgggtgagtaacacgtaggcaacctgcctgcaagactgggataactaccggaaacggtagctaataccggatacgcaagagagtcgcatgactttcttgggaaagacggagcaatctgtcacttgtggatgggcctgcggcgcattagctagttggtgaggtaacggctcaccaaggcgacgatgcgtagccgacctgagagggtgaacggccacactgggactgagacacggcccagactcctacgggaggcagcagtagggaatcttccgcaatggacgaaagtctgacggagcaacgccgcgtgagtgatgaaggttttcggatcgtaaagctctgttgccagggaagaacgtcgggtagagtaactgctacccgagtgacggta

SEQ ID NO: 9328 - DNA, 490 bp, unidentified
  misc_feature 1..490: note = Ascusbbf_461054, encodes 16S rRNA
  source 1..490: mol_type = genomic DNA
agagtttgatcatggctcagaatgaacgttggcggcgtggattaggcatgcaagtcgtgcgataagcgtagcaatacgtggaaagcggcgaaagggagagtaatacgtgggtatctacctcggggcctgggatagcggcgggaaactgccggtaataccagatgatgtctccggaccaaaggtgtgattccgctctaagaggagcccacgtgctattagctagttggcagggtaacggcctaccaaggcaaagatggctatggggtgtgagagcatgcccccactcactgggactgagacactgcccagacacctacgggtggctgcagtcgagaatcttcggcaatgggcgaaagcctgaccgagcgacgccgcgtgcgggatgaaggccttcgggttgtaaaccgctgtcgtaggggaggaaggttttgcgaagagcaaaacttgaccgatcctaggaggaagggccggctaatctcgtgccagcagc

SEQ ID NO: 9329 - DNA, 487 bp, unidentified
  misc_feature 1..487: note = Ascusbbf_1805794, encodes 16S rRNA
  source 1..487: mol_type = genomic DNA
agagtttgatcctggctcagaatgaacgttggcggcatggattaggcatgcaagtcgagcgagaaccgaggaagcttgcttctaaggggacagcggcgaaagggagagtaacaggtggatacctacctccaggctgggaatagcgtcgggaaactggcggtaatgcccaataacatctacggatcaaagctccggcgcctggagatgggtctgctcactattagctagttggtaaggtaatggcttaccaaggcgacgatggttagcgggcgtgagagcgtggcccgtctcactgggactgagacactgcccagacacctacgggtggctgcagtcgagaatcttcggcaatggacgcaagtctgaccgagcgatgccgcgtgcgggatgaaggccttcgggttgcaaaccgctgtcagagggaaggaaattttgaccaaacctcagaggaaggtcgggctaagttcgtgccagcagccgcggtaat

SEQ ID NO: 9330 - DNA, 489 bp, unidentified
  misc_feature 1..489: note = Ascusbbf_514431, encodes 16S rRNA
  source 1..489: mol_type = genomic DNA
agagtttgatcatggctcagaatgaacgctggcggcatggattaggcatgcaagtcgaacgggatccttcggggtccagtggcggaagggtgagtaacacgtgagcaacccgcccccaaggccggaacaagcgctggaaacggcgtctgaaaccggatgaggacccccaccgcatggaggggcgtccaaatattcataccctggggatgggctcgcggcccattagcttgtcggcggggcgacggcccaccgaggcgacgacgggtaggtggtctgagaggatggtcacccacactgggactgagacactgcccagactcctacgggaggcagcagtgggggatattgcgcaatgggggcaaccctgacgcagcaacgccgcgtgaaggatgaaggttttcggattgtaaacttcttttgttagggacgaaaattgacggtacctaacgaataagctccggctaactacgtgccagcagccgcggtaat

SEQ ID NO: 9331 - DNA, 490 bp, unidentified
  misc_feature 1..490: note = Ascusbbf_891157, encodes 16S rRNA
  source 1..490: mol_type = genomic DNA
agagtttgatcctggctcaggatgaacgctagcggcaggcttaacacatgcaagtcgaggggcatcagggggagcaatccccgctggcgaccggcggatgggtgcgtaacgcgtatgcaacctgcccgtaaccggaggataacccgccgaaaggcggactaaaaatccataagaccccgctgcggcatcgcagcgtggtaaaatctgcggaggttgcggatgggcatgcgtgccattaggtagttggtgaggcaacggctcaccaagcctacgatggctagggggtctgagaggatggtcccccacactggaactgagacacggtccagactcctacgggaggcagcagtgaggaatattggtcaatgggcggaagcctgaaccagccatgccgcgtgcaggaagacggccctatgggttgtaaactgcttttgcagaggagtaaagtggcgtacgtgtacgcctttgcaagtactttgcgaataagcat

SEQ ID NO: 9332 - DNA, 490 bp, unidentified
  misc_feature 1..490: note = Ascusbbf_1314219, encodes 16S rRNA
  source 1..490: mol_type = genomic DNA
agagtttgatcatggctcaggatgaacgctagctacaggcttaacacatgcaagtcgaggggtaacgagtgggaagcttgcttcccacgtcgacgaccggcgcacgggtgagtaacgcgtatccaacctgccacatactcggggatagcccggtgaaaaccgaattaatacccgatggcgtcctttgcggacatccaacgaggactaaagatttacggtatgtgatggggatgcgtctgattagcttgttggcggggtaacggcccaccaaggcgacgatcagtaggggttctgagaggaaggtcccccacattggtactgagacacggaccaaactcctacgggaggcagcagtgaggaatattgatcaatgggcgagagcctgaaccagccaagtagcgtgcaggatgacggccctacgggttgtaaactgcttttataagggaacaaagtgaggcacgcgtgcctttttgcgtgtaccttatgaata

SEQ ID NO: 9333 - DNA, 490 bp, unidentified
  misc_feature 1..490: note = Ascusbbf_1567278, encodes 16S rRNA
  source 1..490: mol_type = genomic DNA
agagtttgatcatggctcaggacgaacgctggcggcgtgcttaacacatgcaagtcgaacggagatttttatttcggtaaaaatcttagtggcaaacgggtgagtaacgcgtaggcaacctgcctttccgatggggacaacagttcgaaaggactgctaataccgaatgatgtatatcttccgcatggaggacataccaaagacggcctctatatataagctgtcacggaaagatgggcctgcgtctgattagccagttggcggggtaatggcccaccaaagcgacgatcagtagccggtctgagaggatgaacggccacattgggactgagacacggcccaaactcctacgggaggcagcagtggggaatcttccgcaatggacgaaagtctgacggagcaacgccgcgtgagtgaagaaggttttcgaatcgtaaagctctgttgtcagggacgagcagggggagtatcaacaacactctctcatgac

SEQ ID NO: 9334 - DNA, 472 bp, unidentified
  misc_feature 1..472: note = Ascusbbf_661867, encodes 16S rRNA
  source 1..472: mol_type = genomic DNA
agagtttgatcatggctcagaacgaacgctggcggcaggcttaacacatgcaagtcgaacgggcatagcaatatgtcagtggcagacgggtgagtaacgcgtgggaacgtaccctttactacggaataacgcatggaaacgtgtgctaataccgtatgtgcccttcggggaaaagatttatcggtaaaggatcggcccgcgttggattagctagttagtggggtaaaggcctaccaaggcgacgatccatagctggtctgagaggatgatcagccacattgggactgagacacggcccaaactcctacgggaggcagcagtggagaatattggacaatgggcgcaagcctgatccagccatgccgcgtgagtgatgaaggccccagggttgtaaagctctttcaccggtgaagataatgactgtagccggagaagaagccccggctaacttcgtgccagcagccgcggtaat

SEQ ID NO: 9335 - DNA, 490 bp, unidentified
  misc_feature 1..490: note = Ascusbbf_472837, encodes 16S rRNA
  source 1..490: mol_type = genomic DNA
agagtttgatcatggctcaggacgaacgctggcggcatgcctaacacatgcaagtcgaacggagcttaagaggcttgccttttaagcttagtggcggacgggtgagtaacgcgtgagcaacctgcctctcagtggggaataatgtactgaaaaggacactaataccgcatgatgtatttgagtcgcatgatttgaataccaaagatttatcgctgagagatgggctcgcgtccgattagtttgttggtgaggtaacggctcaccaaggcgacgatcggtagccggactgagaggttgaacggccacattgggactgagacacggcccagactcctacgggaggcagcagtgggggatattgcgcaatgggggaaaccctgacgcagcaatgccgcgtggaggattgaaggtcttcggattgtaaactccttttgtcagggaagataatgacggtacctgacgaataagctccggctaactacgtgccagc

SEQ ID NO: 9336 - DNA, 470 bp, unidentified
  misc_feature 1..470: note = Ascusbbf_225049, encodes 16S rRNA
  source 1..470: mol_type = genomic DNA
agagtttgatcatggctcagaacgaacgctggcggcaggcttaacacatgcaagtcgaacgcccctttcggggggagtggcagacgggtgagtaacgcgtgggaacctacccaaaggtacggaataactcggggaaactcgtgctaataccgtatacgcccttcgggggaaagatttatcgcctttggatgggcccgcgtcggattagctagttggtgaggtaaaagctcaccaaggcgacgatccgtagctggtctgagaggatgatcagccacactgggactgagacacggcccagactcctacgggaggcagcagtggggaatattggacaatgggcgaaagcctgatccagccatgccgcgtgagtgaagaaggccttagggttgtaaagctctttcagcggggaagataatgacggtacccgcagaagaagccccggctaactccgtgccagcagccgcggtaat

SEQ ID NO: 9337 - DNA, 490 bp, unidentified
  misc_feature 1..490: note = Ascusbbf_1519971, encodes 16S rRNA
  source 1..490: mol_type = genomic DNA
agagtttgatcctggctcagattgaacgctggcggcaggcctaacacatgcaagtcgggcggtaacaggaaagagcttgctcttttgctgacgagcggcggacgggtgagtaatgtatggggatctgcctgatggagggggataactactggaaacggtagctaataccgcataacgtcgcaagaccaaagagggggaccttcgggcctcttgccatcggatgaacccatatgggattagctggcaggtggggtaatggcctacctgggcgacgatccctagctggtctgagaggatgaccagccacactggaactgagacacggtccagactcctacgggaggcagcagtggggaatattgcacaatgggcgcaagcctgatgcagccatgccgcgtgtatgaagaaggccttcgggttgtaaagtactttcagcggggaggaaggcagtaaggttaataaccttgctgattgacgttacccgcagaag

SEQ ID NO: 9338 - DNA, 490 bp, unidentified
  misc_feature 1..490: note = Ascusbbf_1835850, encodes 16S rRNA
  source 1..490: mol_type = genomic DNA
agagtttgatcatggctcagattgaacgctggcggcaggcttaacacatgcaagtcgaacggtagcacaggggagcttgctccctgggtgacgagtggcggacgggtgagtaatgcttgggaatctggcttatggagggggataactacgggaaactgtagctaataccgcgtaatgtctatggactaaagggtgggactttcgggccacctgccataagatgagcccaagtgggattaggtagttggtggggtaaaggcctaccaagccgtcgatctctagctggtctgagaggatgaccagccacactggaactgagacacggtccagactcctacgggaggcagcagtgaggaatattgcacaatggggggaaccctgatgcagccatgccgcgtgaatgaagaaggccttcgggttgtaaagttctttcggtgatgaggaaggggtgtaatttaataggttacatcattgacgttaatcacagaag

SEQ ID NO: 9339 - DNA, 490 bp, unidentified
  misc_feature 1..490: note = Ascusbbf_1480475, encodes 16S rRNA
  source 1..490: mol_type = genomic DNA
agagtttgatcctggctcagaacgaacgctggcggcaggcctaacacatgcaagtcgagcgtgaaagggggcttcggctcccgagtaaagcggcgcacgggtgagtaacacgtgaataatctgccctcatgaccgggataacagatcgaaaggactgctaataccggataagctcacacgccaaccgggcgggtgggaaaagtgcgggaccttcgggccgcgcgcgtgaggatgagttcgcgtcccattagatagttggtgaggtaatggctcaccaagtcgacgatgggtagctggtctaagaggatgatcagccacactggaactgagacacggtccagactcctacgggaggcagcagtggggaatcttgcgcaatggaggaaactctgacgcagccatgccgcgtgagtgatgaaggccctcgggttgtaaagctctgtctaaggggacgaacgctcccgcgaacaagagacgcgtgaattgacgg

SEQ ID NO: 9340 - DNA, 490 bp, unidentified
  misc_feature 1..490: note = Ascusbbf_1454880, encodes 16S rRNA
  source 1..490: mol_type = genomic DNA
agagtttgatcatggctcagaatgaacgttggcggcgtggattaggcatgcaagtcgcgcgacaagttcccttcggggaacggaggagcggcgaaagggagagtaacaggtagatatgtgcccttgggaccgggatagcgtcgggaaactggcggtaataccggataacatctccggatcaaatggtgtgattccgcccaaggatcagtctgcttcctattagcttgttggcggggtaatggcccaccaaggctgagatgggtaccgggtgtgagagcatgacccggctcactgggactgagacactgcccagacacctacgggtggctgcagtcgagaatctttggcaatgggcgaaagcctgaccaagcgacgccgcgtgcgggatgaaggccctcgggttgtaaaccgctgtcagttgggaggaagtgcatgagggttatcccttatgcttgaccgatcttcagaggaagtacgggctaagttcgtg

SEQ ID NO: 9341 - DNA, 472 bp, unidentified
  misc_feature 1..472: note = Ascusbbf_1651333, encodes 16S rRNA
  source 1..472: mol_type = genomic DNA
agagtttgatcatggctcagaacgaacgctggcggcaggcttaacacatgcaagtcgaacgggcgtagcaatacgtcagtggcgcacgggtgagtaacgcgtggatatctgccttttggttcgggataaccttgggaaactagggctaataccgaatggttcctacgggataaagatttatcgccaaaagatgagtccgcgtccgattagcttgttggcggggtagcggcccaccaaggcgacgatcggtagctggtctgagaggacgatcagccacactgggactgagacacggcccagactcctacgggaggcagcagtggggaatattggacaatgggggcaaccctaatccagccatgccgcgtgagtgatgaaggccttcgggttgtaaagctcttttggcggggacgatgatgacggtacccgcagaataagccccggctaacttcgtgccagcagccgcggtaat

SEQ ID NO: 9342 - DNA, 490 bp, unidentified
  misc_feature 1..490: note = Ascusbbf_1646504, encodes 16S rRNA
  source 1..490: mol_type = genomic DNA
agagtttgatcatggctcggattgaacgctggcggcaggcctaatacatgcaagtcgaacggtaacataagaaaagcttgcttttcttgatgacgagtggcggacgggtgagtaacatttgggaaactacctgatagagggggacaacagttggaaacgactgctaataccgcatacagcctaagggtgaaagaagcaattcgctatcagatgtgcccaaacgggattagctagtaggtgaggtaaaggctcacctaggcgacgatagttacccggcctaagagggtgatcgggcacattgggactgagatacggccagactcctacgggaggcagcggctaagaatattccgcaatggacgaaagtctgacggagcgacgccgcgtggatgatgaaggccggaaggttgtaaaatccttttatgactgaggaataaggaaagtgagagaaacgctttctggtgactgtaggtcatgaataagcaacggc

SEQ ID NO: 9343 - DNA, 490 bp, unidentified
  misc_feature 1..490: note = Ascusbbf_751034, encodes 16S rRNA
  source 1..490: mol_type = genomic DNA
agagtttgatcctggctcaggatgaacgctagctacaggcttaacacatgcaagtcgaggggcagcatggagtcagcttgctgactctgatggcgaccggcgcacgggtgcgtaacgcgtatccaaccttcccgcgagtcagggacagcccggcgaaagtcggattaatacctgatgttctcctttgacggcatctgatgaggagtaaagatttcatcgcttgcggatggggatgcgtaggattagctggtaggcggggtaacggcccacctaggcgacgatccttaggggttctgagaggaaggtcccccacactggtactgagacacggaccagactcctacgggaggcagcagtgaggaatattggtcaatgtgcgtaagcctgaaccagccaagtagcgtgcaggatgacggccctacgggttgtaaactgcttttatgcggggataacgtgcgccacgggtggtgtattgcaggtaccgcatgaa

SEQ ID NO: 9344 - DNA, 208 bp, unidentified
  misc_feature 1..208: note = Ascusbbf_169833, encodes 16S rRNA
  source 1..208: mol_type = genomic DNA
agagtttgatcctggctcaggacaaacaaccagtaagaatgaacctaaagaaaacagtgcgtagaagatccagactaaagcctctccaaatccaagcaaacctgacttaagcttagaattaagaagaagaatgcacaaattacaatccagaagttccagttagttacttgtgcaaccttgttgacatactgccagcagccgcggtaat

SEQ ID NO: 9345 - DNA, 490 bp, unidentified
  misc_feature 1..490: note = Ascusbbf_372391, encodes 16S rRNA
  source 1..490: mol_type = genomic DNA
agagtttgatcctggctcaggatgaacgctggcggcgtgcctaatacatgcaagtcgagcgaagcacttcggtgcttagcggcgaacgggtgagtaacacgtaggtaacatgaccatatgacgaggataacggttggaaacgactgctaagactggataggaatgactgaggcatctcagtaattttaaagggatctcgtaagggaaacgcgtatggagtgacctgcggcgcattagctagttggtgggatagaagcctaccaaggcgatgatgcgtagccggactgagaggttgaacggccacattgggactgagacacggcccagactcctacgggaggcagcagtagggaattttcggcaatggggggaaccctgaccgagcaacgccgcgtgaatgacgaagtacttcggtatgtaaagttcttttattagtgaagacaggccctttagggggagaagacggtagctaatgaataagccccggcta

SEQ ID NO: 9346 - DNA, 490 bp, unidentified
  misc_feature 1..490: note = Ascusbbf_867643, encodes 16S rRNA
  source 1..490: mol_type = genomic DNA
agagtttgatcatggctcagaatgaacgttggcggcgtggattaggcatgcaagtcgcgcgacaagcccgctaatagcaatattagtgggtggaggagcggcgaaagggtgaggaacacgtggatatctaccctcaggctcgggatagtggcgggaaactgccagtaataccgaataacatctccggatcaaagctccggcacctgaggacgagtccgcgtcccattagctagttggcggggtaatggcccaccaaggcaaagatgggtagtgggcgtgagagcgcgacccaccacactgggactgagatactgcccagacacctacgggtggctgcagtcgagaatcttcggcaatgggcgaaagcctgaccgagcgacgccgcgtggaggatgaaggccttcgggttgtaaactcctgtcggaggggaagaaattttgactaccccctcggaggaagcccgggctaagttcgtgccagcagccgcggt

SEQ ID NO: 9347 - DNA, 490 bp, unidentified
  misc_feature 1..490: note = Ascusbbf_416472, encodes 16S rRNA
  source 1..490: mol_type = genomic DNA
agagtttgatcctggctcaggatgaacgctggcggcatgcctaacacatgcaagtcgaacggagctattacggaagcttgcttttgttttagcttagtggcggacgggtgagtaacgcgtgaggaacctgcccttcagtggggaataacaccgagaaatcggtgctaataccgcataacgtcttgagatcgcatgttcttaagaccaaaggatttattcgctgaaggatggcctcgcgtccgattagttagttggtggggtaacggcctaccaagaccgcgatcggtagccgaactgagaggttgatcggccacattgggactgagacacggcccagactcctacgggaggcagcagtggggaatattgggcaatgggggaaaccctgacccagcaatgccgcgtgaaggacgaaggtcttcggattgtaaacttctttgattggggaagaataaatgacctacccaaagaacaagtcacggctaactac

SEQ ID NO: 9348 - DNA, 483 bp, unidentified
  misc_feature 1..483: note = Ascusbbf_636152, encodes 16S rRNA
  source 1..483: mol_type = genomic DNA
agagtttgatcatggctcagagcgaacgctagcggcgggcttaacacatgcaagtcgagcgcttcacttcggtgaagagcggcggacgggtgagtaacacgtaggttacctgcccccgggtgagggataaccgagggaaacctcggctaataccactgttggtctacggatcaaaggcttcggccgcctggggatgggcctgcgtcccattatttaatcctagttggtggggtaatggcctaccaagggtacgatgggtagctggtctgagaggatgatcagccacactggaactgagacacggtccagactcctacgggaggcagcagtggggaatattgcgcaatgggcgaaagcctgacgcagccacgccgcgtgagtgatgaaggccccagggtcgtaaagctctgtcgggggggaagaaaatctgacggtaccccccaagaaagcaccggctaactccgtgccagcagccgcggtaat

SEQ ID NO: 9349 - DNA, 490 bp, unidentified
  misc_feature 1..490: note = Ascusbbf_569652, encodes 16S rRNA
  source 1..490: mol_type = genomic DNA
agagtttgatcctggctcaggacgaacgctggcggcgtgcttaacacatgcaagtcgagcggacggaggaacttcggttccgaagttagcggcggacgggtgagtaacgcgtgaacaatctgtcccagacagggggataacacatcgaaagatgtgctaataccgcataagaccacggtgccgcatggcacaggggtaaaagaacggaatcggtttggggtgagttcgcgtctgattagctagttggtgaggtaacggcccaccaaggcgacgatcagtagccgatctgagaggatgaccggccacattggaactgagagacggtccaaactcctacgggaggcagcagtggggaatattgggcaatgggcgcaagcctgacccagcaacgccgcgtgagggaagaaggttttcggattgtaaacctctgtcctaagggaagaaaggaatgacggtaccttaggaggaagccccggctaactacgtgcca

SEQ ID NO: 9350 - DNA, 490 bp, unidentified
  misc_feature 1..490: note = Ascusbbf_1443186, encodes 16S rRNA
  source 1..490: mol_type = genomic DNA
agagtttgatcatggctcaggacgaacgctggcggcgtgcctaacacatgcaagtcgaacggggttatctgacttcggttggataacctagtggcgaacgggtgagtaacgcgtgagcaacctgaccttcagagggggataacatttggaaacagatgctaataccgcataagaccacgacccggcatcgggatgaggtcaaaggagcaatccgctgaaggaggggctcgcgtcccattagatagttggtgaggtaacggcccaccaagtcgacgatgggtagccgagctgagaggctgatcggccacactggaactgagacacggtccagactcctacgggaggcagcagtggggaatattgggcaatggggggaaccctgacccagcaacgccgcgtgagggaagaaggccttcgggttgtaaacctctgtccttggtgacgaagtaagtgacggtagccaaggaggaagccccggctaactacgtgc

SEQ ID NO: 9351 - DNA, 490 bp, unidentified
  misc_feature 1..490: note = Ascusbbf_1760256, encodes 16S rRNA
  source 1..490: mol_type = genomic DNA
agagtttgatcatggctcaggacgaacgctggcggcgcgcttaacacatgcaagtcgaacgggcgtcttcgggcgtcagtggcggacgggtgcgtaacacgtgagcaacctacctggagttgggggataacctcgggaaaccggggctaataccgcatgtgctctgttgcctggaggggtgatggaggaaaggggctttcgggccctgactcgagaggggctcgcggcgtatcagctagctggtgaggtaacggctcaccagggcgatgacgcgtagggggtctgagaggatggccccccacattgggactgagatacggcccagactcctacgggaggcagcagtggggaatcttgcgcaatggccgaaaggctgacgcagcgacgccgcgtgcgggaggaagcccttcggggtgtaaaccgctgtcagagggggcgaatgccatggggaggaaatgcctttcatggagggacggtaccctcagaggaa

SEQ ID NO: 9352 - DNA, 486 bp, unidentified
  misc_feature 1..486: note = Ascusbbf_683031, encodes 16S rRNA
  source 1..486: mol_type = genomic DNA
agagtttgatcctggctcagaatgaacgttggcagcgtggattaggcatgcaagtcgagcgacaaggtgcttcggcactggaggagcggcaaacggggtagtaaggcatcggaacgtaccctcttgttcaggatacccgcgggaaactgcggttaatactggataatcccgaaagggcaaaggtccgccgcgggaggagcggccgatgtgatatcagctagttggtagggtaatggcctaccaaggcttagacgtctagggggtgtgagagcatggcccccaccactgggactgagatactgcccagacacttacgggtggctgcagtcgagaatcttcggcaatgggcgcaagcctgaccgagcgacgctgcgtgtgggatgaaggcccttgggttgtaaaccactgtcagaggggatgaaagcgtaagcttgacagagcctcagaggaagcgcgggctaagttcgtaccagcagccgcggtaat

SEQ ID NO: 9353 - DNA, 489 bp, unidentified
  misc_feature 1..489: note = Ascusbbf_194298, encodes 16S rRNA
  source 1..489: mol_type = genomic DNA
agagtttgatcatggctcagcctgaacgctggcggcgtggctaagacatgcaagtcgcacgggcgtagcaatacgtcagtggcgaacgggtgagtaatgaatcgctaatgtaccctggactctgggatagctagccgaaaggctaggtaataccagatgagaccacggcaccgcatggtgttgtgctcaaaggtccgccggtctgggatcaggcgatttcgtatcagctagttggtagggtaatggcctaccaaggcgacgacgcgtagccggactgagaggttggccggccacatcgggactgagacactgcccggactcctacggggggctgcagtaacgaatcttccgcaatgcacgaaagtgtgacggagcgacgccgcgtgtaggatgaagtccttcgggatgtaaactactgtcaggggttagaaagttctgatcaaccccagaggaaggcacggctaactctgtgccagcagccgcggtaat

SEQ ID NO: 9354 - DNA, 490 bp, unidentified
  misc_feature 1..490: note = Ascusbbf_482297, encodes 16S rRNA
  source 1..490: mol_type = genomic DNA
agagtttgatcctggctcaggatgaacgctggcggcgtgcctaacacatgtaagtcgagcggagttattcggaagcttgcttctgaataacttagcggcggacgggtgagtaacgcgtgagcaacctgcccttaacagaggaacaacagtgagaaatcgctgctaatgcctcataagctcccgctgccacatggcagagagagaaaagatttatcggttagggaggggctcgcgtctgattagctagttggtggggtaacggcctaccaaggcgacgatcagtagccgacctgagagggtgatcggccacattggaactgagacacggtccaaactcctacgggaggcagcagtggggaatattgcacaatgggggaaaccctgatgcagcaacgccgcgtgaaggaagaagtggttcgccacgtaaacttctatcaatagggaagaataaaattgacagtacctaaataagaagcaccggctaaatacg

SEQ ID NO: 9355 - DNA, 490 bp, unidentified
  misc_feature 1..490: note = Ascusbbf_1839275, encodes 16S rRNA
  source 1..490: mol_type = genomic DNA
agagtttgatcctggctcagaatgaacgctggcgacgtggattaggcatgcaagtcgcgcgagatccgtagcaatacggtgaaagcggcgtaagggatagtaacacgtagatacgtaccctcgggtctggaatagctgcgggaaactgcaggtaatgccagataatgttttcgaaccaaaggtgagattccgcccgtggattggtctgcgtcctattagcttgttggtgaggtaatggctcaccaaggcaatgatgggtagcgggtgtgagagcacgacccgcatcactgggactgagacactgcccagacacctacgggtggctgcagtcgaggatcttcggcaatgggcgcaagccttaccgagcgacgtcgcgtgcgggatgaaggccttcgggttgtaaaccgctgtcagtggggaggaagtataggtgggtactcccatctatttgacctatccgcagaggaagtgtgggctaagttcgtgccag

SEQ ID NO: 9356 - DNA, 490 bp, unidentified
  misc_feature 1..490: note = Ascusbbf_765497, encodes 16S rRNA
  source 1..490: mol_type = genomic DNA
agagtttgatcctggctccggacgaacgctggcggcgtgcttaacacatgcaagtcgaacgaggtccaaccgatcttcggattggtgacgacctagtggcgaacgggtgcgtaacacgtgaggaacctaccccagtctctggaataacaagcggaaacgtttgctaataccggatgtcgtcgctccatcacatgacggagcgacaaaagatttatcgggttgggagggtctcgcggcctatcagctagttggtgaggtaacggttcaccaaggcatcgacgggtagctggtctgagaggatgatcagccacactgggactgagacacggcccagactcctacgggaggcagcagtggggaatcttgcacaatgggcgaaagcctgatgcagcaacgccgcgtgcgggaagaaggccctagggttgtaaaccgctttcagcagggaagaaactgacggtacctgcagaagaaggtgcggccaactacgtgc

SEQ ID NO: 9357 - DNA, 490 bp, unidentified
  misc_feature 1..490: note = Ascusbbf_1220055, encodes 16S rRNA
  source 1..490: mol_type = genomic DNA
agagtttgatcctggctcaggacgaacgctggcggcgtgcctaacacatgcaagtcgagcgagaagtcaataacagatttcttcggaatgaagtaattgatggaaagcggcggacgggtgagtaacgcgtgagtaacctgccttcaagagggggacaacagttggaaacgactgctaataccgcataacattgcgaaatcgcatgataacgcaatcaaagatttatcgcttgaagatggactcgcgtccgattagatagttggtgaggtaacggctcaccaagtcgacgatcggtagccgaactgagaggttgatcggccacattgggactgagacacggcccagactcctacgggaggcagcagtgggggatattgcgcaatgggggcaaccctgacgcagcaacgccgcgtgaaggaagaaggttttcggattgtaaacttctttaagtgtggaagaagatgacggtacacacagaataagccacggc

SEQ ID NO: 9358 - DNA, 470 bp, unidentified
  misc_feature 1..470: note = Ascusbbf_435849, encodes 16S rRNA
  source 1..470: mol_type = genomic DNA
agagtttgatcatggctcagaacgaacgctggcggcaggcctaacacatgcaagtcgaacgctctcgcaagagggagtggcgcacgggtgagtaacacgtgggaatctacctgatagtacgggataacagttggaaacgactgctaataccgtatacgcccttagggggaaagatttatcgctatcagatgagcccgcgctagattagctagttggtgaggtaaaggctcaccaaggctccgatctatagccggtctgagaggacgatcggccacactgggactgagacacggcccagactcctacgggaggcagcagtggggaatattgggcaatggacgcaagtctgacccagccatgccgcgtgagtgatgaaggccttagggttgtaaagctctttcagtagtgaagataatgactgtaactacagaagaagccccggctaattccgtgccagcagccgcggtaat

SEQ ID NO: 9359 - DNA, 472 bp, unidentified
  misc_feature 1..472: note = Ascusbbf_589819, encodes 16S rRNA
  source 1..472: mol_type = genomic DNA
agagtttgatcatggctcagaacgaacgctggcggcaggcctaacacatgcaagtcgaacgggcgtagcaatacgtcagtggcagacgggtgagtaacacgtgggaacctacccggtggtacggaataactcagggaaacttgagctaataccgaatacgcccttagggggaaagatttatcgccatcggaagggcccgcgtcggattagtttgttggtggggtaatggcctaccaagactacgatccgtagctggtctgagaggatgaccagccacactgggactgagacacggcccagactcctacgggaggcagcagtggggaatcttggacaatgggcgcaagcctgacccagccatgccgcgtgagtgaagaaggccctagggttgtaaagctctttcggcggggacgataatgacggtacccgcagaagaagccccggctaactccgtgccagcagccgcggtaat

SEQ ID NO: 9360 - DNA, 490 bp, unidentified
  misc_feature 1..490: note = Ascusbbf_1571614, encodes 16S rRNA
  source 1..490: mol_type = genomic DNA
agagtttgatcatggctcaggatgaacgctggcggcgtgcttaacacatgcaagtcgagcgagaaatcgctcagccaactcttcggatgaagcagagcgatggaaagcggcggacgggtgagtaacgcgtgggaaacctgcccctggcagggggacagccgagggaaacttcgattaataccccataaagcagggaaatcgcatgatgatcttgccaaagatttatcggccagggatggtcccgcgtctgattagctggttggtgaggtagcggctcaccaaggcgacgatcagtagccggcctgagagggtgaacggccacattggaactgagacacggtccagactcctacgggaggcagcagtggggaatattgcacaatgggagaaaccctgatgcagcaacgccgcgtgaaggaagaaggccttcgggtcgtaaacttctgtccttggggaagaagaatgacggtacccttggaggaagccccgg

SEQ ID NO: 9361 - DNA, 490 bp, unidentified
  misc_feature 1..490: note = Ascusbbf_1898594, encodes 16S rRNA
  source 1..490: mol_type = genomic DNA
agagtttgatcatggctcagaatgaacgctggcggcgtgcctaacacatgcaagtcgagcgagaaagctccttcgggagtaagtacagcggcggacgggtgagtaacacgtgagaatctaccctttagtgaagaatacccttgggaaatcaaggttaatgctgcatatgtcccttcggggagaaagatggcctctttgctgtcgctaaaggatgagcttgcggactattagctagttggtgaggtaatggctcaccaaggcgatgatggatagccggcctgagagggtgtacggccacactggaacttagacacggtccagactcctacgggaggcagcagtgaggaatattgcgcaatgggcgaaagcctgacgcagcgacgccgcgtggaggatgacggtcttcggaatgtaaactcctgcttaagtgggaagaaagactcgcttttaatagaagcgagggatgacggtaccattagagaaagcaccg

SEQ ID NO: 9362 - DNA, 172 bp, unidentified
  misc_feature 1..172: note = Ascusbbf_182261, encodes 16S rRNA
  source 1..172: mol_type = genomic DNA
agagtttgatcctggctcagcggtaaaggaaacatcatcaagtaccggatgctctggatcatcagagaaatgaaaaccaacatgattgaaaacaactttgccttgaatctgcaatggctgttcattcggctcaacttcaatttcaggcttagttgccagcagccgcggtaat

SEQ ID NO: 9363 - DNA, 490 bp, unidentified
  misc_feature 1..490: note = Ascusbbf_586087, encodes 16S rRNA
  source 1..490: mol_type = genomic DNA
agagtttgatcctggctcaggatgaacgctagctacaggcttaacacatgcaagtcgaggggcagcgggggagcagcaatgctcctgccggcgaccggcgcacgggtgcgtaacgcgtatccaacctgccgcgtactccgggacagccctctgaaaggaggattaataccggatgttgccggggccaggcatctggcccgggcgaaagattcatcggtacgccgatggggatgcgtctgattagcttgttggcggggtaacggcccaccaaggcgacgatcagtaggggttctgagaggaaggtcccccacataggaactgagacacggtcctaactcctacgggaggcagcagtgaggaatattggtcaatgggcggaagcctgaaccagccaagtagcgtgaaggaagactgccctacgggttgtaaacttcttttatccgggaataaagtgcgccacgcgtggcgttttgtatgtaccggatgaata

SEQ ID NO: 9364 - DNA, 487 bp, unidentified
  misc_feature 1..487: note = Ascusbbf_497328, encodes 16S rRNA
  source 1..487: mol_type = genomic DNA
agagtttgatccttgctcagaacgaacgctggcggcaggcttaacacatgcaagtcgagcgcgcgctttcgggcgtgagcggcggacgggtgagtaacgcgtgggaacgtgccctttggttcggaatagccctgggaaaccgggagtaatgccgaataagctctccttgagtagatcttggggaggaaagatttatcgccgaaggatcggcccgcgttggattaggtagttggtggggtaacggcctaccaagccgacgatccatagctggtttgagaggatgaccagccacactgggactgagacacggcccagactcctacgggaggcagcagtggggaatcttggacaatgggggcaaccctgatccagccatgccgcgtgagcgatgaaggccttagggttgtaaagctctttcagcggggaagataatgacggtacccgcagaagaagccccggctaactccgtgccagcagccgcggtaat

SEQ ID NO: 9365 - DNA, 490 bp, unidentified
  misc_feature 1..490: note = Ascusbbf_1324557, encodes 16S rRNA
  source 1..490: mol_type = genomic DNA
agagtttgatcctggctcaggatgaacgctagcggcaggcttaacacatgcaagtcgaggggtaacgcggggtagcaatactctggcgacgaccggcgcacgggtgcgtaacgcgtatgcaacctacctgtaacaggggtataacggagagaaatttccactaatcccccatattgttattctttcgcatgttaggataacgaaagcttcggtggttacggatgggcatgcgtgacattagctagttggtaaggtaacggcttaccaaggcgacgatgtctaggggagctgagagacttatcccgcaccctgcaactgagccacggaccaacttccgacggagggaagcagtgaggaatattggtaaatggacggaagtctgaaccagccatgccgcgtggaggaagaaggtcctatgggttgtaaactccttttgttcgagagtaataagggctttgcgaagcccgatgagagtatcggacgaataagc

SEQ ID NO: 9366 - DNA, 490 bp, unidentified
  misc_feature 1..490: note = Ascusbbf_1220894, encodes 16S rRNA
  source 1..490: mol_type = genomic DNA
agagtttgatcatggctcaggacgaacgctggcggcgtgcctaacacatgcaagtcgaacggggtccatgagagcttgctctcggacgacctagtggcgaacgggtgagtaacacgtgagaaacctgccttggagtggggaataactcggggaaactcgagctaataccgcataccttcctttgatagcatggtcagctgaagaaagaatttcgctccaagagggtctcgcggcctatcagcttgttggtggggtaacggcctaccaaggcaacgacgggtagctggtttgagagaacgatcagccacactggaactgagacacggtccagactcctacgggaggcagcagtggggaatcttgcgcaatgggcgaaagcctgacgcagcaacgccgcgtgcgggatgaaggccttcgtggttgtaaaccgctttcagcagggacgaaaatgacggtacctgcagaagaagccccggctaactacgtgcca

SEQ ID NO: 9367 - DNA, 488 bp, unidentified
  misc_feature 1..488: note = Ascusbbf_692272, encodes 16S rRNA
  source 1..488: mol_type = genomic DNA
agagtttgatcctggctcagaacgaacgctggcggcatggattaggcatgcaagttgaacgaacccctcggggtgagtagcggaagggtgaggaacgcgtgagtaatctgcccccaagttgggaataacagctggaaacggctgctaataccgaatgtggctcttggttcgcatggaccttgggctaaaggtttactgcttggggatgagctcgcgtcccattaggtagttggtgaggtaacggctcaccaagccgacgatgggtagctggtctgagaggatggtcagccacactgggactgagacactgcccagactcctacgggaggctgcagtcgagaatcttgggcaatgcgcgaaagcgtgacccagcagtgccgcgtgtgtgatgaaggccctcgggtcgtaaaacactgtctcccgtgacgaaatttgacggtagcggggaaggaagccacggctaactacgtgccagcagccgcggtaat

SEQ ID NO: 9368 - DNA, 468 bp, unidentified
  misc_feature 1..468: note = Ascusbbf_595400, encodes 16S rRNA
  source 1..468: mol_type = genomic DNA
agagtttgatcatggctcagaacgaacgctggcggcaggcctaaaacatgcaagtcgaacgaaccttcgggttagtggcgcacgggtgagtaacacgtgggaatatgcccttcactacggaacaacgtcgggaaactgacgctaataccgtataatgtctccggaccaaagatttatcggtgaaggattagcccgcgtctgattaggtagttggtgaggtaatggctcaccaagccgacgatcagtagctggtctgagaggatgatcagccacactggaactgagacacggtccagactcctacgggaggcagcagttaggaatattggacaatgggggaaaccctgatccagccatgccgcgtgtgtgaagaaggccttagggttgtaaagcactttcagctgtgaagataatgacagtagcagaagaagaagctccggctaaattcgtgccagcagccgcggtaat

SEQ ID NO: 9369 - DNA, 490 bp, unidentified
  misc_feature 1..490: note = Ascusbbf_1783768, encodes 16S rRNA
  source 1..490: mol_type = genomic DNA
agagtttgatcctggctcagggtgaacgctggcggcgtgcctaatacatgcaagtcgaacgagagcgaccttcgggtcaatctagtggcgaacgggtgagtaacacgtaggtaacctaccttagagtttggaataacagttggaaacgactgctaataccgaataggtaataggaagacatcttccaattattaaagatcccctaaaggatcgctaaaagagggacctgcgctgcattagttagttggtaaggtaacggcttaccaagaccgtgatgcatagccggactgagaggttgaacggcaacactgggactgagacacggcccagactcctacgggaggcagcagtagggaatcttcggcaatggggggaaccctgaccgagcaacgccgcgtgaatgaagaagtacttcggtacgtaaaattcttttattagggaagaatgatatttgtaggaaatgacaaataagtgacggtacctaatgaat

SEQ ID NO: 9370 - DNA, 490 bp, unidentified
  misc_feature 1..490: note = Ascusbbf_292103, encodes 16S rRNA
  source 1..490: mol_type = genomic DNA
agagtttgatcctggctcaggacgaacgctggcggcgtgcctaacacatgcaagtcgaacgagaaataatataatgatcccttcggggagaattggattatggacagtggcggacgggcgagtaacgcgtgagtaacctgcccataaggaagggatagcccttggaaacgaggagtaataccttatgacatacagataccgcatggtgactgtatcaaagatttatcgcttatggatggactcgcgtctgattagatagttggtgaggtaacggctcaccaagtcgacgatcagtagccgaactgagaggttgatcggccgcattgggactgagacacggcccagactcctacgggaggcagcagtgggggatattgcgcaatgggggaaaccctgacgcagcaacgccgcgtgcaggaagaaggtcttcggattgtaaactgttgtcgcaggggaagaagaaagtgacggtaccctgtgagaaagtcac

SEQ ID NO: 9371 - DNA, 490 bp, unidentified
  misc_feature 1..490: note = Ascusbbf_1243719, encodes 16S rRNA
  source 1..490: mol_type = genomic DNA
agagtttgatcctggctcaggatgaacgctggcggcgtgcttaacacatgcaagtcgaacgaagcacttaatgaagcttgctttataaagtgactgagtggcggacgggtgagtaacgcgtgggtaacctgcctcacacagggggataacagttagaaatgactgctaataccgcataaaatagcagtatcgcatgatacaactatcaaagatttatcggtgtgagatggacccgcgtctgattagcttgttggtggggtaacggcctaccaaggcgacgatcagtagccgacctgagagggtgaccggcaacattgggactgagacacggcccaaactcctacgggaggcagcagtggggaatattggacaatgggcgcaagcctgatccagcgacgccgcgtgagcgatggagtatttcggtatgtaaagctctatcagcagggaagaaaacgacggtacctgactaagaagccccggctaactacgt

SEQ ID NO: 9372 - DNA, 490 bp, unidentified
  misc_feature 1..490: note = Ascusbbf_481010, encodes 16S rRNA
  source 1..490: mol_type = genomic DNA
agagtttgatcctggctcaggatgaacgctagcggcaggcttaacacatgcaagtcgaggggcagcacgtcttcggatggtggcgaccggcgaacgggtgagtatcgcgtatgcaatctaccttttactggggcatagcccggggaaacccggattaatatcccatagtaccatttactggcatcagtttttggttaaagcttcggcggtaaaagatgagcatgcgtcctattagcttgatggtaaggtaacggcttaccatggctttgataggtaggggtcctgagagggagatcccccacactggtactgagacacggaccagactcctacgggaggcagcagtgaggaatattggacaatgggcgagagcctgatccagccatgccgcgtgcaggaagactgccctatgggttgtaaactgcttttatacgggaagaaacactccctcgtgagggagcttgacggtaccgtatgaataaggatcggc

SEQ ID NO: 9373 - DNA, 490 bp, unidentified
  misc_feature 1..490: note = Ascusbbf_1368512, encodes 16S rRNA
  source 1..490: mol_type = genomic DNA
agagtttgatcctggctcagaatgaacgctggcggcatggattaggcatgcaagtcgaacgagaaagcggcctcggccgcgagtaaagtggcgaaagggtgagtatcacgtggggaacctgccccggggaccggaacaagcccgtgaaaacgggtctgagaccggatgaggccccgtcccgcatgggtcggaggcgaaacattcatggccccgggatggccccgcgccccattagctggttggcggggtgacggcccaccaaggctgcgacgggtaggtggtctgagaggatggtcacccacactgggactgagacactgcccagactcctacgggaggctgcagtcgagaatcttccgcaatgggcgcaagcctgacggagcgatgccgcgtgagggaaggaggccttcgggtcgtaaacctctgtcggccggaatgaagcagatgacggtaccggccaaggaagccacggctaaccacgtgccagcag

SEQ ID NO: 9374 - DNA, 490 bp, unidentified
  misc_feature 1..490: note = Ascusbbf_455113, encodes 16S rRNA
  source 1..490: mol_type = genomic DNA
agagtttgatcatggctcaggatgaacgctggcggcgtgcttaacacatgcaagtcgagcggaagtattttaaagcttgctttttaatactttagcggcggacgggtgagtaacgtgtgggtaacctgccatatactggggaataatcatttgaaaagatgactaataccgcatgtggtcacgagaaggcatcttcttgtgaagaaaggacttcggttcggtatatgatggacccgcatctgattagctagttggtgagataacagctcaccaaggcaacgatcagtagccgacctgagagggtgatcggccacattgggactgagacacggcccaaactcctacgggaggcagcagtggggaatattgcacaatgggcgaaagcctgatgcagcaacgccgcgtgaaggaagaagggtttcggctcgtaaacttctatcaatggggaagaaataaatgacggtacccaaataagaagccccggctaact

SEQ ID NO: 9375 - DNA, 490 bp, unidentified
  misc_feature 1..490: note = Ascusbbf_1034442, encodes 16S rRNA
  source 1..490: mol_type = genomic DNA
agagtttgatcatggctcagattgaacgctggcggcatgccttacacatgcaagtcgaacggtaacgcgggggcaaccctggcgacgagtggcgaacgggtgagtaatacatcggaacgtacccagtagtgggggatagctcggcgaaagccggattaataccgcatacgcactgtggtggaaagcgggggatcgcaagacctcgcgctattggagcggccgatgtcggattagcttgttggtggggtaagagcctaccaaggcgacgatccgtagctggtctgagaggacgaccagccacactgggactgagacacggcccagactcctacgggaggcagcagtggggaattttggacaatgggcgaaagcctgatccagcaatgccgcgtgtgtgaagaaggccttcgggttgtaaagcacttttgtccggaaagaaatctgtctggctaatacccggacgggatgacggtaccggaagaataagcac

SEQ ID NO: 9376 - DNA, 490 bp, unidentified
  misc_feature 1..490: note = Ascusbbf_1219721, encodes 16S rRNA
  source 1..490: mol_type = genomic DNA
agagtttgatcctggctcagaacgaacgctggcggcaggcctaacacatgcaagtcgagcgcgaaagggacttcggtcccgagtaaagcggcgcacgggtgagtaacacgtgaataatctgcctttatgactgggataacagaccgaaaggactgctaataccggataagctcccgcgccaatcgggcgagtggagaaaagagtgggacccttcggggccacttccatagagatgagttcgcgtcccattagatagttggtgaggtaatggctcaccaagtcaacgatgggtagctggtcttagaggatgatcagccacactggaactgagacacggtccagactcctacgggaggcagcagtggggaatcttgcgcaatggaggaaactctgacgcagccatgccgcgtgagtgatgaaggccctcgggtcgtaaagctctgtctaaggggaagaacggtgcaaggtctaacaggctttgcaattgacg

SEQ ID NO: 9377 - DNA, 490 bp, unidentified
  misc_feature 1..490: note = Ascusbbf_1833504, encodes 16S rRNA
  source 1..490: mol_type = genomic DNA
agagtttgatcatggctcaggatgaacgctagcggcaggcctaacacatgcaagtcgaggggtataaggagcttgctccttagagaccggcgcacgggtgcgtaacgcgtatgcaatctaccttatgcaggggaatagcccgaagaaatttggattaatgccccatggtatatagaaaaggcatcttttttatattaaagttgaggcggcataagatgagcatgcgtcccattagctagttggtatggtaacggcataccaaggctacgatgggtaggggtcctgagagggagatcccccacactggtactgagacacggaccagactcctacgggaggcagcagtgaggaatattggacaatggtcgggagactgatccagccatgccgcgtgcaggaagactgccctatgggttgtaaactgcttttgtacaagaagaataagaggtacgtgtaccttgatgacggtattgtacgaataagcaccggc

SEQ ID NO: 9378 - DNA, 490 bp, unidentified
  misc_feature 1..490: note = Ascusbbf_735996, encodes 16S rRNA
  source 1..490: mol_type = genomic DNA
agagtttgatcatggctcaggatgaacgctggcggcgtgcctaatacatgcaagtcgaacggagcgagacgctgaactgagataagcttgcttaaggaagttcttgttaagcttagtggcggacgggtgagtaacacgtgagcaacctgcctttcagagggggacaacgactggaaacggtcgctaataccgcataacataccgaagcggcatcgcattggtatcaaaggagcaatccgctgaaagatgggctcgcgcctgattagatagttggtgaggtaacggctcaccaagtcgacgatcagtagccggactgagaggttgaacggccacattgggactgagatacggcccagactcctacgggaggcagcagtagggaatattgcacaatgggggaaaccctgatgcagcaacgccgcgtgaaggaagacggttttcggattgtaaacttcttttctttgtgaagaaacaaatgacggtagcaaag

SEQ ID NO: 9379 - DNA, 472 bp, unidentified
  misc_feature 1..472: note = Ascusbbf_1362992, encodes 16S rRNA
  source 1..472: mol_type = genomic DNA
agagtttgatcctggctcagagcgaacgctggcggaatgcttaacacatgcaagtcgcacgggggcttcggctcgagtggcggacgggtgagtaacgcgtaggaacgtgtcttggggtgggggataacgctgggaaactagcgctaataccgcatatgggctgaggcccaaagccttcgggtgccttgagagcggcctgcgtccgattagctagttggtggggtaaaggcttaccaaggcttcgatcggtagctggtctgagaggacgatcagccacactgggactgagacacggcccagactcctacgggaggcagcagtggggaatattggacaatgggcggaagcctgatccagcaattccgcgtgggtgaagaaggtcttcggattgtaaagccctttcgacagggacgatgatgacggtacctgtagaagaagccccggctaacttcgtgccagcagccgcggtaat

SEQ ID NO: 9380 - DNA, 468 bp, unidentified
  misc_feature 1..468: note = Ascusbbf_1876354, encodes 16S rRNA
  source 1..468: mol_type = genomic DNA
agagtttgatcctggctcagaacgaacgctggcggcaggcctaacacatgcaagtcgaacgctctagcaatagagagtggcagacgggtgagtaacgcgtgggaaccttcccagtggtgcggaatagctcagggaaacttggggtaataccgcatgagcccgaaaggggaaagatttatcgccattggatgggcccgcgtcggattagctagttggtgaggtaatggctcaccaaggcaacgatccgtagctggtttgagagaatgaccagccacactgggactgagacacggcccagactcctacgggaggcagcagtgggaatcttggacaatgggcgcaagcctgatccagccatgccgcgtgagtgacgaaggccttagggttgtaaagctcttttggcggggacgataatgacggtacccgcagaataagccccggctaacttcgtgccagcagccgcggtat

SEQ ID NO: 9381 - DNA, 490 bp, unidentified
  misc_feature 1..490: note = Ascusbbf_1679631, encodes 16S rRNA
  source 1..490: mol_type = genomic DNA
agagtttgatcctggctcaggatgaacgctggcagcgtgcctaatacatgcaagtcgaacgaaagcacttgtgctttagtggcgaacgggtgagtaacacgtaggtaacctgcccttatgacgaggataacagttggaaacgactgctaagactggatagtagcgaacaaggcatcttgaacgctttaaataacctaagggttaacataaggaggggcctgcggtgcattagttagttggtgaggtaagagctcaccaagaccgtgatgcatagccggactgagaggttgaacggccacattgggactgagacacggcccaaactcctacgggaggcagcagtagggaattttcggcaatggaggaaactctgaccgagcaacgccgcgtgattgaagaagcacttcggtgcgtaaaaatcttttattggggaagaaagacatgtagagggaatgctacgtgagtgacggtacccattgaataagccccg

SEQ ID NO: 9382 - DNA, 490 bp, unidentified
  misc_feature 1..490: note = Ascusbbf_581455, encodes 16S rRNA
  source 1..490: mol_type = genomic DNA
agagtttgatcctggctcaggatgaacgctagcggcaggcctaacacatgcaagtcgaggggtaagaagagcttgctcttcctagaccggcgtacgggtgcgtaacgcgtgtacaatctaccttatacagagggatagcccggagaaatctggattaatatctcatagtattatatataggcatctctatatgattaaagcgtaagcggtataagatgagtacgcgttctattagctagttggagtggtaacggcaccccaaggctacgatagataggggtcctgagagggagatcctccacactggtactgagacagggaccagactcctacgggaggcagcagtgaggaatattggtcaatggtcggaagactgaaccagccatgccgcgtgcaggaagacggccttatgggttgtaaactgcttttgtatgggaagaataagctctacgcgtagagtgatgacggtactatacgaataagcatcggc

SEQ ID NO: 9383 - DNA, 490 bp, unidentified
  misc_feature 1..490: note = Ascusbbf_1797540, encodes 16S rRNA
  source 1..490: mol_type = genomic DNA
agagtttgatcctggctcaggacgaacgctggcggcgtgcttaacacatgcaagtcgtgcggaaaggctccttcgggggtgctcgagcggcgaacgggtgagtaacacgtgagtgacctgcccttcactttgggataaccctcggaagcgggggctaataccggatatgatctgccgccgcatggtggtgggtggaaagggcccctttttggggtttggtgggggatgggctcgcggcctatcagcttgttggtggggtgatggcctaccaaggcggtgacgggtagccggcctgagagggcgaccggccacactgggactgagacacggcccagactcctacgggaggcagcagtggggaatcttgcacaatgggcgaaagcttgatgcagcgacgccgcgtgggggatgacggccttcgggttgtaaacctctttcagctctgacgaagttgcccgtgtttgcgggtggtgacggtaggggtagaaga

SEQ ID NO: 9384 - DNA, 490 bp, unidentified
  misc_feature 1..490: note = Ascusbbf_1049807, encodes 16S rRNA
  source 1..490: mol_type = genomic DNA
agagtttgatcatggctcaggacgaacgctggcggcgtgcctaacacatgcaagtcgaacggagtacccgagaaagaagcttcggcagaaattttggaatacttagtggcggacgggtgagtaacgcgtgagcaacctgcctttaagagggggataacataccgaaaggtatgctaataccgcataacgtatgatcgtcacatggcggacataccaaagatttatcgcttagagatgggctcgcgtccgattagatagttggtgaggtaacggctcaccaagtcgacgatcggtagccggactgagaggttgaacggccacattgggactgagacacggcccagactcctacgggaggcagcagtgggggatattgcgcaatggggggaaccctgacgcagcaacgccgcgtgaaggaagaaggtcttcggattgtaaacttctgtcttatgggacgaagaatgacggtaccataggaggaagccacggc

SEQ ID NO: 9385 - DNA, 472 bp, unidentified
  misc_feature 1..472: note = Ascusbbf_1165207, encodes 16S rRNA
  source 1..472: mol_type = genomic DNA
agagtttgatcctggctcagaacgaacgctggcggcaggcttaatccatgcaagtcaagggggtgtagcaatacacaaccggcgtacgggtgagtaacgcgtgggaatgtgtccatttgtggggaatagcttctggaaacggaaggtaataccgcatacgcccttcgggggaaagatttatcgcagatggagcggcccgcgttagattagctagttggtggggtaacggcttaccaaggcgatgatctatagctggtctgagaggacgatcagccacattgggactgagacacggcccagactcctacgggaggcagcagggaggaatattgggcaatgggggaaaccctgacccagccatgccgcgtgagtgaagaaggccttcgggttgtaaagctcttttatacgggaagatgatgacggtaccgtaagaataagcaccggctaacttcgtgccagcagccgcggtaat

SEQ ID NO: 9386 - DNA, 490 bp, unidentified
  misc_feature 1..490: note = Ascusbbf_1377586, encodes 16S rRNA
  source 1..490: mol_type = genomic DNA
agagtttgatcatggctcaggatgaacgctagcggcaggcttaacacatgcaagtcgaggggtaacgcggggtagcaatactctggcggcgaccggcggaagggtgcgtaacgcgtgagcaacttgcccgtcactggggataggcactggaaacggtgtgtaatactccataacatatggattcacatggatttatattgaaagattcgttggtgacggatgggctcgcgtaacattagctagtcggcggggtaacggcccaccgaggctaagatgtttaggggttctgagaggaaggtcccacgacctggaactgggacacggtcccgactcctcagggaggccgcagtgaggaatattggtcaatgggcggaagcctgaaccagccatgccgcgggcaggaataaggccctatgggtcgtaaactgcttttccttgagggcaataaggatcacgtgtggtccgatgagagtatcaggggaataagcat

SEQ ID NO: 9387 - DNA, 484 bp, unidentified
  misc_feature 1..484: note = Ascusbbf_1523715, encodes 16S rRNA
  source 1..484: mol_type = genomic DNA
agagtttgattctggctcagaacgaacgctggcggcaggcttaacacatgcaagtcgagcgcggtctttcgggactgagcggcggacgggtgagtaacgcgtgggaacgtgccttcttctctggaatagccctgggaaactgggagtaatgccggatacgcccttggcagcgatgtctgggggaaagatttatcggaggaaggtcggcccgcgttggattaggtagttggtggggtaatggcctaccaagccgacgatccatagctggtttgagaggatgaccagccacactgggactgagacacggcccagactcctacgggaggcagcagtggggaatcttggacaatgggggcaaccctgatccagccatgccgcgtgagcgatgaaggccttagggttgtaaagctctttcagcggggaagataatgacggtacccgcagaagaagccccggctaactccgtgccagcagccgcggtaat

SEQ ID NO: 9388 - DNA, 476 bp, unidentified
  misc_feature 1..476: note = Ascusbbf_555797, encodes 16S rRNA
  source 1..476: mol_type = genomic DNA
agagtttgatcatggctcagagcgaacgctggcggcatgcttaacacatgcaagtcggacgggggtgcgtaagtgccctagtggcggacgggtgagtaacgcgtaggtatctatccataggtgggggataacattgggaaactggtgctaataccgcataatatctgagggttaaaggcgtaagttgtctatgggggagcctgcgtttgattagctagttggtggggtaaaggcctaccaaggcgatgatcgatagctggtttgagaggatgatcagccacactgggactgagacacggcccagactcctgcgggaggcagcagtggggaatattggacaatgggggcaaccctgatccagcaatgccgcgtgtgtgaagaaggtcttcggattgtaaagcactttcgacggggacgatgatgacggtacctgtagaagaagctccggctaacttcgtgccagcagccgcggtaat

SEQ ID NO: 9389 - DNA, 490 bp, unidentified
  misc_feature 1..490: note = Ascusbbf_1371864, encodes 16S rRNA
  source 1..490: mol_type = genomic DNA
agagtttgatcatggctcaggatgaacgctagcggcaggcttaacacatgcaagtcgaggggtaacgcggggtagcaatactctggcgacgaccggcgcacgggtgcgtaacgcgtatgcaacctacctgtaacaggggtataacggagagcaatttccactaatcccccatattgttattctttcgcatgttaggataacgaaagcttcggtgtttacggatgcgcatgcgtgacattagctagttggtaaggtaacggcttaccaaggcgacgatgtctaggggggctgggaggcttatcccccaaactggtactgggaaccggtccagactcctacgggaggcagcagtgaggaataatggtcaatggacggaaatctgaaccagccaagccgcgtggaggaagaaggccctatgggttgtaaactccttttgttcgagagtaatatgaggcttgcgagcctcgatgagagtatcggacgaataagc

SEQ ID NO: 9390 - DNA, 490 bp, unidentified
  misc_feature 1..490: note = Ascusbbf_833984, encodes 16S rRNA
  source 1..490: mol_type = genomic DNA
agagtttgatcatggctcaggacgaacgctggcggcgtgcttaacacatgcaagtcgaacgaagatgccgagggagcttgctcccatgccagactgagtggcggacgggtgagtaacgcgtgagtaacctgccttcaggagggggacaacttagggaaacttaagctaataccgcataatattgtaattccgcatggaggtacaatcaaagatttatcgcctgaagatggactcgcgtccgattaggtagttggtgaggcaacggctcaccaagccgacgatcggtagccggactgagaggtcgaacggccacattgggactgagacacggcccagactcctacgggaggcagcagtggggaatattgcgcaatggggggaaccctgacgcagcaacgccgcgtgaaggaagaaggttttcggattgtaaacttcagcaaacagggaagaaaaggacagtacctgattggaagccacggctaactacgtg

SEQ ID NO: 9391 - DNA, 490 bp, unidentified
  misc_feature 1..490: note = Ascusbbf_1802870, encodes 16S rRNA
  source 1..490: mol_type = genomic DNA
agagtttgatcatggctcagagcgaacgctggcggcatgcttaacacatgcaagtcgcacgaaggtttcggccttagtggcggacgggtgagtaacgcgtaggaatctatccgtgggtgggggataactctgggaaactggagctaataccgcatgacacctgagggtcaaaggcgcaagtcgcctgcggaggagcctgcgtttgattagcttgttggtggggtaatggcctaccaaggcgacgatcagtaggggttctgagaggaaggtcccccacattggtactgagacacggaccaaactcctacgggaggcagcagtgaggaatattggtcaatgggcgagagcctgaaccagccaagtagcgtgcaggacgactgccctatgggttgtaaactgcttttatcagggaataaagtgcggcacgtgtgccgttttgtatgtacctgatgaataaggaccggctaattccgtgccagcagccgcggta

SEQ ID NO: 9392 - DNA, 490 bp, unidentified
  misc_feature 1..490: note = Ascusbbf_1758086, encodes 16S rRNA
  source 1..490: mol_type = genomic DNA
agagtttgatcatggctcagattgaacgctggcggcatgctttacacatgcaagtcgaacggcagcgcggggcaacctggcggcgagtggcgaacgggtgagtaatatatcggaacgtacccagaagtgggggataacgtagcgaaagttacgctaataccgcatacgatctacggatgaaagtgggggaccttcgggcctcatgcttgtggagcggccgatatctgattagctagttggtagggtaaaggcctaccaaggcgacgatcagtagctggtctgagaggacgaccagccacactgggactgagacacggcccagactcctacgggaggcagcagtggggaattttggacaatgggcgcaagcctgatccagcaatgccgcgtgagtgaagaaggccttcgggttgtaaagctcttttgtcagggaagaaacggctgaggataataccttcggctaatgacggtacctgaagaataagcaccg

SEQ ID NO: 9393 - DNA, 490 bp, unidentified
  misc_feature 1..490: note = Ascusbbf_1046796, encodes 16S rRNA
  source 1..490: mol_type = genomic DNA
agagtttgatcctggctcagaatgaacgttggcggcgtgcttaacacatgcaagtcgagcgagaaaagtcttcggacttagcaaagcggcggacgggtgagtaacgcgtgggaatctgccttttagtgaagaataccctcgagaaatcgaggttaatactgcataagtcccgtaagggagaaagatggcctctttgctgtcgctaaaagatgagcccgcgtactattagctagttggtggggtaaaggcctaccaaggcgatgatggttaaccggcctgagagggtgtacggtcacactggaactgagacacggtccagactcctacgggaggcagcagtgaggaatattgcgcaatgggcgaaagcctgacgcagcgacgccgcgtggaggatgaaggttttaggattgtaaactcctgttaagtgggaagaaacgacgagttctaataaaattcgtaactgacggtaccattagagaaagcaccggct

SEQ ID NO: 9394 - DNA, 490 bp, unidentified
  misc_feature 1..490: note = Ascusbbf_1365668, encodes 16S rRNA
  source 1..490: mol_type = genomic DNA
agagtttgatcatggctcagaacgaacgctggcggcaggcttaacacatgcaagtcgaacggtctcttcggaggcagtggcagacgggtgagtaacgcgtgggaatctacctagttctacggaacaacagttggaaacgactgctaataccgtatacgccctatgggggaaagatttatcggaattagatgagcccgcgtaagattagctagttggtggggtaatggcctaccaaggcgacgatctttagctggtctgagaggatgatcagccacactgggactgagacacggcccagactcctacgggaggcagcagtggggaatattggtcaatgggcgagagcctgaaccagccaagtagcgtgcaggacgactgccctatgggttgtaaactgcttttatcagggaataaagtgcggcacgtgtgccgttttgtatgtacctgatgaataaggaccggctaattccgtgccagcagccgcggtaat

SEQ ID NO: 9395 - DNA, 490 bp, unidentified
  misc_feature 1..490: note = Ascusbbf_1778282, encodes 16S rRNA
  source 1..490: mol_type = genomic DNA
agagtttgatcctggctcaagacgaacgctggcggcgtgcctaacacatgcaagtcgagcgatgaaaaagaagtagatctcatcggagtgacacctctttggattagcggcggacgggtgagtaacacgtgagcaacctgccgtacacattgggatagcctcgggaaactgggattaataccaaacgaaacatattgatagcattatcaaaatgtcaaagatttatcggtgtacgatgggctcgcgtctgattagctagttggtgagataaaagctcaccaaggcaatgatcagtagccggcctgagagggtgatcggccacattgggactgagacacggcccaaactcctacgggaggcagcagtggggaatattgcacaatggagggaactctgatgcagcgacgccgcgtgagcgaagaaggaattcgtttcgtaaagctctgtcctatgggaagataatgacggtaccatagaagaaagccccggc

SEQ ID NO: 9396 - DNA, 470 bp, unidentified
  misc_feature 1..470: note = Ascusbbf_463881, encodes 16S rRNA
  source 1..470: mol_type = genomic DNA
agagtttgatcctggctcagaatgaacgctggcggcaggcctaaaacatgcaagtcgaacgcatccttcgggatgagtggcgcacgggtgagtaacatgtgggaatatgccttttggtacggaacaacttttggaaacgaaagctaataccgtatggtcccttcggggtaaagatttatcgccaaaagattagcccgcactagattagctagttggtgaggtaagagctcaccaaggcgacgatctatagctggtctgagaggacgatcagccacactgggactgagacacggcccagactcctacgggaggcagcagttaggaatattggacaatgggcgcaagcctgatccagccatgccgcgtgaacgatgaaggccttcgggttgtaaagttctttagccgacgaatataatgactgtagtcggagaataagccccggctaacttcgtgccagcagccgcggtaat

SEQ ID NO: 9397 - DNA, 490 bp, unidentified
  misc_feature 1..490: note = Ascusbbf_465117, encodes 16S rRNA
  source 1..490: mol_type = genomic DNA
agagtttgatcatggctcagaatgaacgctggcggcatggattaggcatgcaagtcgaacgccgcggtttcggccgcggagtggcgaaagggtgcgcaacgcgtggggaacctgcccccgggtccgggacaagcgctggaaacggcgtctgatacgggatgcggatccgcctggcatcaggcggcgtccaaagattcatcgcccggggagggccccgcgtcccattagctagttggcggggtaacggcccaccaaggcaacgacgggtaggtggtctgagaggatggtcacccacactgggactgagacactgcccagactcctacgggaggctgcagtcgagaatcttccgcaatgggcgcaagcctgacggagcgatgccgcgtgagggatggaggccttcgggtcgtgaacctctgtcacccgggacgaagaattgacggtaccgggagaggaagccacggctaactacgtgccagcagccgcggta

SEQ ID NO: 9398 - DNA, 484 bp, unidentified
  misc_feature 1..484: note = Ascusbbf_693845, encodes 16S rRNA
  source 1..484: mol_type = genomic DNA
agagtttgatcctggctcagaacgaacgctggcggcaggcttaacacatgcaagtcgagggaggacttcggtcctagcggcggacgggtgagtaacgcgtgggaacgtgcccttctctctggaatagccctgggaaaccgggagtaatgccggatacgccgtttcgtggagacacgggatgggaaagatttatcggtgaaggatcggcccgcgttggattaggtagttggtggggtaatggcctaccaagccgacgatccatagctggtttgagaggatgatcagccacactgggactgagacacggcccaaactcctacgggaggcagcagtggggaatcttggacaatgggggcaaccctgatccagccatgccgcgtgagcgatgaaggccttagggttgtaaagctctttcagcggggaagataatgactgtacccgcagaagaagccccggctaactccgtgccagcagccgcggtaat

SEQ ID NO: 9399 - DNA, 490 bp, unidentified
  misc_feature 1..490: note = Ascusbbf_1375010, encodes 16S rRNA
  source 1..490: mol_type = genomic DNA
agagtttgatcctggctcaggatgaacgctagctacaggcttaacacatgcaagtcgaggggtaacatggaggtagcaatacttctgatgacgaccggcgcactggtgagtaacacgtatgcaacctgcccctgtcagtgggataatccagggaaacttggtctaataccgcatgacacgtcccggggcctcccgggacgttgaaagattcgtttcggacagggatgggcatgcgcagcattagctggttggtggggtaacggcccaccaaggcgacgatgcttaggggttctgagaggaaggtcccccacactggtactgagacacggaccagactcctacgggaggcagcagtgaggaatattggtcaatggccgcagggctgaaccagccaagtcgcgtgagggaagacggccctacgggttgtaaacctcttttgccggggagtaacgatgcggacgcgtccgcagctgagagtacccggagaaaa

SEQ ID NO: 9400 - DNA, 490 bp, unidentified
  misc_feature 1..490: note = Ascusbbf_1330127, encodes 16S rRNA
  source 1..490: mol_type = genomic DNA
agagtttgatcctggctcaggatgaacgctagcggcaggcctaatacatgcaagtcgaacggtcagtagcaatactgatagtggcgcacgggtgcgtaacacgtaactaacctacctataactgggggatagcccgccgaaaggcggattaataccgcataagctgtttgagtggcatcactcgattagtaaagatttattggttatagatggggttgcgggtcattagctagttggtaaggtaacggcttaccaaggcgacgacgactaggggagctgagaggctggtcccccacacgggcactgggatacgggcccgactcctacgggaggcagcagtagggaatattgggcaatgggcgagagcctgacccagccatgccgcgtgcaggaagaaggctttctgagtcgtaaactgcttttgacagggaagaataagccttacgtgtagggtgatgacggtacctgcagaataagcaccggctaactc

SEQ ID NO: 9401 - DNA, 490 bp, unidentified
  misc_feature 1..490: note = Ascusbbf_673963, encodes 16S rRNA
  source 1..490: mol_type = genomic DNA
agagtttgatcctggctcaggatgaacgctagcggcaggcttaacacatgcaagtcgaggggcagcatgggactgagattcgtcgaagtcctgatggcgaccggcgcaagggtgcgtaacgcgtgagcaacttgcccgtttcagggggataaccggtggaaacgccgactaataccccatggtattgggttcaggcatctttacccaattaaagaatttcggaaacggataggctcgcgtgacattagctagatggcggggtaacggcccaccatggcgacgatgtctaggggttctgagaggaaggtcccccacactggaactgagacacggtccagactcctacgggaggcagcagtgaggaatattggtcaatggtctgacgactgaaccagccatgccgcgtgaaggtcacggccctatgggtcttaaacttcttttgtaagggagcaataagtcccacgtgtgggatgatgagagtaccttacga

SEQ ID NO: 9402 - DNA, 490 bp, unidentified
  misc_feature 1..490: note = Ascusbbf_1552603, encodes 16S rRNA
  source 1..490: mol_type = genomic DNA
agagtttgatcctggctcaggacgaacgctggcggcgtggattaggcatgcaagtcgagcgatatccaaccttcgggttggtgaaagcggcgaacgggtgagtaacacgtgaacaacctgccctcacattctggataatagaccgaaaggtcttgtaatacaggcgaggatttctcttaggcatctttgagaaagggaaggcgcaagccgtgcgaggaggggttcgcggattatcaggtagatggtgaggtaacggctcaccatgccgacgacgattaggtggtctgagaggatggtcacccacattgggactgagacactgcccagactcctacgggaggctgcagtcgagaatcttgcacaatgtacgaaagtatgatgcagcgacgccgcgtgaaggatgaaggccctctgggtcgtaaacttcttttatgtgggaagaataaatgacggtaccacatgaataagccacggctaactacgtgccagc

SEQ ID NO: 9403 - DNA, 470 bp, unidentified
  misc_feature 1..470: note = Ascusbbf_776298, encodes 16S rRNA
  source 1..470: mol_type = genomic DNA
agagtttgatcatggctcagaacgaacgctggcggcaggcttaacacatgcaagtcgagcgggcacttcggtgtcagcggcagacgggtgagtaacgcgtggggatctgcctagtggtacgggacaactcagggaaacttgagctaataccgtataagtccttcgggagaaagatttatcgccactagatgaacccgcgtctgattagctagttggtagggtaatggcctaccaaggcgacgatcagtagctggtctgagaggatgatcagccacactgggactgagacacggcccagactcctacgggaggcagcagtggggaatattggacaatgggcgcaagcctgatccagccatgccgcgtgagtgatgaaggccttagggttgtaaagctctttcgctggggaagataatgacggtacccagataagaagccccggctaacttcgtgccagcagccgcggtaat

SEQ ID NO: 9404 - DNA, 490 bp, unidentified
  misc_feature 1..490: note = Ascusbbf_1620527, encodes 16S rRNA
  source 1..490: mol_type = genomic DNA
agagtttgatcctggctcaggatgaacgctagctacaggcctaacacatgcaagtcgaggggcatcatgggagaagctcgcttttcccgatggcgaccggcgaatgggtgagtcacgcgtgtccaacctgcccccggcccggggatagcccttggaaatgaggattaacacccgatatgtggtttcgccgcatggcgtttccatgaaacgaggccggggatggggatgcgtcggattagcttgacggtggggcgacggcccaccgtggcgacgatccgcaggggttctgagaggaaggtcccccacactggcactgagacacgggccagactcctacgggaggcagcagtgaggaatattggtcaatggccgagaggctgaaccagccaagtagcgtgcaggacgacggccctacgggttgtaaactgcttttgcgggaggataaagtgcgccacgcgtggcgctttgcaggtatcccgtgaataaggac

SEQ ID NO: 9405 - DNA, 488 bp, unidentified
  misc_feature 1..488: note = Ascusbbf_960053, encodes 16S rRNA
  source 1..488: mol_type = genomic DNA
agagtttgatcatggctcagaacgaacgctggcggcaggcttaacacatgcaagttgaacggtattgttgagtagcttgctatttgacaagagagtagcgcattggtgagtaacacgtgggaacgtaccttttggtggggaataacgtttggaaacgaacgctaataccgcataagccctgagggggaaagatttatcgccgaaagaacggcccgcggaagattaggtagttggtggggtaacggcctaccaagccgacgatctatagctggtctgagaggacgatcagccacattggaactgagacacggtccaaactcctacgggaggcagcagtgaggaatattgggcaatggaggaaactctgacccagccatgccgcgtgagtgaagaaggtcttcggattgtaaagctctttcggataagacgatgatgacggtattatctaaagaagccccggctaacttcgtgccagcagccgcggtaat

SEQ ID NO: 9406 - DNA, 490 bp, unidentified
  misc_feature 1..490: note = Ascusbbf_1339138, encodes 16S rRNA
  source 1..490: mol_type = genomic DNA
agagtttgatcatggctcagattgaacgctggcggcaggcctaacacatgcaagtcgagcggcatcagggagtagcttgctactctgctggcgagcggcggacgggtgagtaatgtatggggatctgcctgatggagggggataactactggaaacggtagctaataccgcataatctcgcaagagcaaagggtgggaccttcgggccacttaccatcagatgaacccatatgggattagctagtaggtgtggtaaaggcgcacctaggcgacgatctctagctggtctgagaggatggacagccacactgggactgagacacggcccagactcctacgggaggcagcagtggggaatattgcacaatgggggaaaccctgatgcagccatgccgcgtgtatgaagaaggccttcgggttgtaaagtactttcagtgatgaggaagtttctttgtttaagagatgagggaattgacgttagtcacagaag

SEQ ID NO: 9407 - DNA, 487 bp, unidentified
  misc_feature 1..487: note = Ascusbbf_1275669, encodes 16S rRNA
  source 1..487: mol_type = genomic DNA
agagtttgatcatggctcaggacgaacgctggcggcgtgcttaatacatgcaagtcgagcgagtgtagcaatacacgagcggcggacgggtgagtaacgcgtgggcaacctgccctctagcctgggataacagttcgaaaggactgctaacaccggatattctcacagggagacatctcccagtgaggaaagtttacactagaggatgggcccgcgtcccattagcttgttggtgaggtaacggctcaccaaggcgacgatgggtagccgacctgagagggtgatcggccacactgggactgagaaacggcccagactcctacgggaggcagcagtagggaattttccgcaatgggcgaaagcctgacggggcaacgccgcgtgagggatgaaggttttcggatcgtaaacctctgtcttcagggaagataatgacggtacctgaggaggaagccacggctaactacgtgccagcagccgcggtaat

SEQ ID NO: 9408 - DNA, 488 bp, unidentified
  misc_feature 1..488: note = Ascusbbf_388487, encodes 16S rRNA
  source 1..488: mol_type = genomic DNA
agagtttgatcctggctcagaacgaacgctggcggcaggcctaacacatgcaagttgaacgagaacttgggatagcttgctattttgagtgagagtagcgcacgggtgagtaacacatgggaacataccgtatagtggggaataacagttggaaacggctgctaataccgcataatccctgagggggaaagatttatcgctaaacgaatggcccatggcagattaggtagtaggtggggtaatggcctacctagccgacgatctgtagctggtctgagaggacgatcagccacattgggactgagacacggcccagactcctacgggaggcagcagtgaggaatattgggcaatgggggcaaccctgacccagccatgccgcgtgagtgaagaaggttttcggattgtaaagctctttcagatgtgaagatgatgacggtagcatcagaagaagccccggcaaacttcgtgccagcagccgcggtaat

SEQ ID NO: 9409 - DNA, 490 bp, unidentified
  misc_feature 1..490: note = Ascusbbf_1543400, encodes 16S rRNA
  source 1..490: mol_type = genomic DNA
agagtttgatcatggctcaggacgaacgctggcggcgtgcttaacacatgcaagtcgaacgctgaagcactagcttgctggtgtggatgagtggcgaacgggtgagtaacacgtgagtaacctgccccggactctggggtaagcgctggaaacggtgtctaataccggatacgacctatcaccgcatggtgtgtgggtggaaagactgtgtcggtttgggatggactcgcggcctatcagcttgatggtgaggtaatggctcaccatggcgacgacgggtagccggcctgagagggtgatcggccacactgggactgagacacggcccagactcctacgggaggcagcagtggggaatattgcacaatgggcgcaagcctgatgcagaacgccgcgtgagggatgacggccttcgggttgtaaacctcttttagtaaggaagaagccttcgggtgacggtacttgcagaaaaagcaccggctaactacgt

SEQ ID NO: 9410 - DNA, 490 bp, unidentified
  misc_feature 1..490: note = Ascusbbf_1338071, encodes 16S rRNA
  source 1..490: mol_type = genomic DNA
agagtttgatcatggctcaggacgaacgctggcggcgtgcctaacacatgcaagtcgaacggagttaagacttcggttttaacttagtggcgaacgggtgagtaacgcgtgagaaacctacctttcagtgggggacaacagttggaaacgactgctaataccgcataatgtagcgtcggggcatcccgatgctaccaaagctttatgtgctgaaagatggtctcgcgtctgattagctagttggtgaggtaacggctcaccaaggcgacgatcagtagccggtctgagaggatgaacggccacattgggactgagatacggcccagactcctacgggaggcagcagtggggaatattgggcaatgggggaaaccctgacccagcaacgccgcgtgaaggaagaaggccttcgggttgtaaacttcttttaccagggacgaagaacgtgacggtacctggagaaaaagcaacggctaactacgtgccagca

SEQ ID NO: 9411 - DNA, 490 bp, unidentified
  misc_feature 1..490: note = Ascusbbf_613688, encodes 16S rRNA
  source 1..490: mol_type = genomic DNA
agagtttgatcctggctcaggacgaacgctggcggcgcgcttaacacatgcaagtcgaacgtgaagcccgggcttgcccgggtggaaagtggcgaacgggtgcgtaacacgtgagcaacctgccccgaagaccgggataacaccgggaaaccggtgctaataccggataccctcatatcgtcgcatggcgaaatgaggaaatggattccgcttcgggatgggctcgcggtctatcagcttgttggtggggtaacggctcaccaaggctacgacggatagctggtctgagaggatgtccagccacactgggactgagacacggcccagactcctacgggaggcagcagtggggaatcttgcacaatgggcgaaagcctgatgcagcgacgccgcgtgcgggatgacggccttcgggttgtaaaccgctttcagcagggacgattatgacggtacctgcagaagaagccccggccaactacgtgccagcagc

SEQ ID NO: 9412 - DNA, 490 bp, unidentified
  misc_feature 1..490: note = Ascusbbf_762065, encodes 16S rRNA
  source 1..490: mol_type = genomic DNA
agagtttgatcatggctcaggatgaacgctagcggcaggcttaatacatgcaagtcgaggggtaacaggggagcttgctcccgctgacgaccggcaaacgggtgcggaacacgtacacaaccttccttttagtggggaatagcccagggaaacttggattaataccccgtaacatgttgataaggcatcttattaatattatagcagcaatgcgctagaagacgggtgtgcgcatgattaggtagttggcggggtaatggcccaccaagcctacgatcattaactggtgtgagagcacgaccagtcacacgggcactgagacacgggcccgactcctacgggaggcagcagtaaggaatattggtcaatggaggaaactctgaaccagccatgccgcgtggaggatgaaggtcctctggattgtaaacttcttttatatgggacgaaaaaagggttttctaactcgtctgacggtaccatatgaataagc

SEQ ID NO: 9413 - DNA, 490 bp, unidentified
  misc_feature 1..490: note = Ascusbbf_959611, encodes 16S rRNA
  source 1..490: mol_type = genomic DNA
agagtttgatcctggctcaggacgaacgctggcggcgtgcttaacacatgcaagtcgagcggtaaggccttcgggtacacgagcggcgaacgggtgagtaacacgtgggtgatctgccctgtacttcgggataagcctgggaaactgggtctaataccggatatgaccgcttctcgcatggggggtggtggaaagccttgtgcggtatgggatgggcccgcggcctatcagcttgttggtggggtaatggcctaccaaggcgacgacgggtagccggcctgagagggcgaccggccacactgggactgagacacggcccagactcctacgggaagcagcagtggggaatattgcacaatgggcgcaagcctgatgcagcgacgccgcgtgggggatgacggccttcgggttgtaaacctctttcgcctacgacgaagcgagagtgacggtagtaggagaagaagcaccggccaactacgtgccagcagcc

SEQ ID NO: 9414 - DNA, 487 bp, unidentified
  misc_feature 1..487: note = Ascusbbf_1736682, encodes 16S rRNA
  source 1..487: mol_type = genomic DNA
agagtttgatcatggctcagggtaaacgctggcggcgtgcctaaaacatgcaagtcgaacgagaacttcggttcgagtggcagacggctgagtaacacgtggatgacctgcccgactgtggggaataactgcccgaaagggtggctaataccgcatacgttcccagattcgattttgggaggaaagctcgcaagggcgcagatggaggggtccgcggccgattagctagttggtggggtaacggcctaccaaggcgacgatcggtagctggtctgagaggatgatcagccagactgggactgagacacggcccagactcctacgggaggcagcagttaggaattttgggcaatgggcgaaagcctgacccagcaacgccgcgtgggtgacgaaggccttcgggtcgtaaagcccttttctgagggaagatagtgacggtacctcaggaagaagcaccggctaactacgtgccagcagccgcggtaat

SEQ ID NO: 9415 - DNA, 165 bp, unidentified
  misc_feature 1..165: note = Ascusbbf_476641, encodes 16S rRNA
  source 1..165: mol_type = genomic DNA
agagtttgatcatggctcagtatctgccagcagccgcggtaatagagtttgatcatggctcagccagcagccccggtaatgccagcagccgcggtaataccagcagccgtggtaatctgtctagagtttgatcctggctcagactctgccagcagccgcggtaat

SEQ ID NO: 9416 - DNA, 488 bp, unidentified
  misc_feature 1..488: note = Ascusbbf_1532857, encodes 16S rRNA
  source 1..488: mol_type = genomic DNA
agagtttgatcatggctcagaacgaacgctggcggcaggcttaacacatgcaagtcgaacgccccgcaaggggagtggcagacgggtgagtaacgcgtgggaacgtaccctttactacggaataactcagggaaacttgtgctaataccgtatgtgcccttcgggggaaagatttatcggtaaaggatcggcccgcgttggattagctagttggtggggtaaaggctcaccaaggcgacgatccatagctggtctgagaggatgatcagccacactgggactgagacacggcccagactcctacgggaggcagcagtgaggaatattggtcaatgggcggtagcctgaaccagccaagtcgcgtgagggatgacggccccacgggttgtaaacctcttttgtcggggagtaacccgctccacgtgtggagcgctgagagtacccggcgaataagcatcggctaactccgtgccagcagccgcggtaat

SEQ ID NO: 9417 - DNA, 490 bp, unidentified
  misc_feature 1..490: note = Ascusbbf_1629951, encodes 16S rRNA
  source 1..490: mol_type = genomic DNA
agagtttgatcatggctcaggatgaacgctggcggcgcgcctaacacatgcaagtcgaacggccggaccacctcggtgggcgaggcagtggcgaacggctgagtaacacgtgggcaacctgcctatcagaggggaacaacagttagaaatgactgctaataccgcatatgcctaagcatcacatggtgcaatagggaaaggagcaatctgctgatagatgggcttgcgtctgattagatagttggtggggtaacggcctaccaagtcgacgatcagtagccggactgagaggttgaacggccacattgggactgagatacggcccagactcctacgggaggcagcagtcgggaatattgcgcaatggaggaaactctgacgcagtgacgccgcgtgcaggaagaaggttttcggattgtaaactgctttagacagggaagaaaaaagacagtacctgtagaataagctccggctaactacgtgccagcag

SEQ ID NO: 9418 - DNA, 490 bp, unidentified
  misc_feature 1..490: note = Ascusbbf_1782261, encodes 16S rRNA
  source 1..490: mol_type = genomic DNA
agagtttgatcctggctcaggatgaacgctggcggcgtgcttaacacatgcaagtcgaacgaagcacttaagattgactcttcggatgacgtcttttgtgacttagtagcggacgggtgagtaacgcgtgggtaacctgcctcacacagggggataacagttagaaatgactgctaataccgcataacccgataggatcgcatgatccagacggaaaagatttatcggtgtgagatggacccgcgtctgattagttagttggtggggtaagagcctaccaagacgatgatcagtagccgagctgggaggctggccggccacattgggactgagatacggcccagactcctacgggaggcagcagttgggaatattgggcaatggaggaaactctgatccagtgacgccgcgtgaaggaagaaggtcttcgaattgtaaacttattttatcagggaagaagaaagtgacagtacctgaagaaaaaggaccg

SEQ ID NO: 9419 - DNA, 490 bp, unidentified
  misc_feature 1..490: note = Ascusbbf_647293, encodes 16S rRNA
  source 1..490: mol_type = genomic DNA
agagtttgattatggctcagaacgaacgctggcggcgtgcctaacacatgcaagtcgagcgagaaagggcccttcggggcctgagtaaagcggcggacgggtgagtaacacgtgagtaacgtgccttcgagtgggggataactgtccgaaaggacagctaataccgcatgagaccacagcggcttcggccgccggggtcaaagccttcgggcgctcgaagattggctcgcggaccattagctagttggtggggtaatggcccaccaaggctgagatggttagctggtctgagaggatgatcagccacactgggactgagacacggcccagactcctacgggaggcagcagtggggaatcttgcgcaatgggcgaaagcctgacgcagcaacgccgcgtgtgtgatgaaggctttcgggtcgtaaagcactgtcaggagggaagattgtgacggtacctccagaggaagcaccggctaactccgtgccagc

SEQ ID NO: 9420 - DNA, 490 bp, unidentified
  misc_feature 1..490: note = Ascusbbf_993850, encodes 16S rRNA
  source 1..490: mol_type = genomic DNA
agagtttgatcctggctcagaacgaacgctggcggcgcgcttaacacatgcaagtcgagcggtccggggcaactcgggcagcggcgaacgggtgagtaacacgtggataatctgccctcgagacagggataacccggggaaactcgggctaataccagataagcttccggagaggcatctctctgggggaaaaggggcaacccactcgaggatgagcccgcggcccattagctagttggcggggtaaaggcccaccaaggcgacgacgggtagctggtctgagaggacgaccagtcacactggaactgagacacggtccagactcctacgggaggcagcagtggggaatcttgcgcaatgggcgaaagcctgacgcagcgacgccgcgtgtgcgatgaaggtcttcggatcgtaaagcactgtcgcgagggaagaaacctgacggtacctcgagaggaagcaccggctaactctgtgccagcagccgcgg

SEQ ID NO: 9421 - DNA, 490 bp, unidentified
  misc_feature 1..490: note = Ascusbbf_1080628, encodes 16S rRNA
  source 1..490: mol_type = genomic DNA
agagtttgatcctggctcaggacgaacgctggcggcgtgcttaacacatgcaagtcgagcggaaaggccactccggtggtactcgagcggcgaacgggtgagtaacacgtgagtaatctgccctccactttgggatagccaccggaaacggtgattaataccagatatgacatggatccgcatgggtttgtgtggaaagtttttcggtgggggatgtgctcgcggcctgtcagcttgatggtgaggtaatggctcaccatggcttcgacgggtagccggcctgagagggtgaccggtcacactgggactgagacacggcccagactcctacgggaggcagcagtggggaatattggacaatgggcggaaacctgatccagcaacgccgcgtgagggatgacggccttcgggttgtaaacctctttcgcctaggacgaagcgagagtgacggtactaagtaaagaagcaccggccaactacgtgccagcag

SEQ ID NO: 9422 - DNA, 233 bp, unidentified
  misc_feature 1..233: note = Ascusbbf_536008, encodes 16S rRNA
  source 1..233: mol_type = genomic DNA
agagtttgatcatggctcagccatcgcaccctcattccaatagaattccaatagacgattgtctatgaacatcatggaccgtgacatagaagtctgtcaatgcgatgtgcggtcgagcgcctgcgcggcgaggcgttcctcgccggccgcccgccagacctcacgggccgccgtcgcgttgagcgcgacgatgaacaggccgagcacgatgtcgggccagcagccgcggtaat

SEQ ID NO: 9423 - DNA, 490 bp, unidentified
  misc_feature 1..490: note = Ascusbbf_1435514, encodes 16S rRNA
  source 1..490: mol_type = genomic DNA
agagtttgatcctggctcaggacgaacgctggcggcgtgcttaacacatgcaagtcgagcggtaaggccctttcgggggtacacgagcggcgaacgggtgagtaacacgtgagtaatctgcccttcacttcgggataactaccggaaacggtgtctaataccggatatgaccacgtactgcatggtgtgtggtggaaagttctggcggtgaaggatgtgctcgcggcctatcagcttgttgttgaggtaatggctcaccaatgcttcgacgggtagccggcctgagagggtgaccggccacactgggagtgagacacggcccagactactacgggaggcagcaggggggaatattggacaatggccgaaagcctgatacagccacgccgcgtgagggatgactgccttcgggttgtaaacctctttcagtaccgacgaagcgagagtgacggtaggtacagaagaagctccggccaactacgtgccagca

SEQ ID NO: 9424 - DNA, 490 bp, unidentified
  misc_feature 1..490: note = Ascusbbf_1152728, encodes 16S rRNA
  source 1..490: mol_type = genomic DNA
agagtttgatcctggctcaggacgaacgctggcggcgggtttaacacatgcaagtcgagggacgaagcctacttcggtgggtggagaccggcgaacgggtgagtaacacgtgaggaacctacccggtacttcgggataaccgcgggaaaccgtggctaataccggatattccgagtctgacgcatgtcgggtttgggaaagttcaggcggtatcggacggcctcgcggcgtatcagcttgttggtggggtaatggcttaccaaggcgacgacgcgtagctggagtgagagctcgatcagccacactgggactgagacacggcccagactcctacgggaggcagcagtggagaatcttgcacaatgggcgaaagcctgatgcagccacgccgcgtgcgggaagaaggccttcgggtcgtaaaccgctttcaggggggaagaagcgtcaagtgacggtacctccagaagaaggaccggccaactacgtgcca

SEQ ID NO: 9425 - DNA, 490 bp, unidentified
  misc_feature 1..490: note = Ascusbbf_1806986, encodes 16S rRNA
  source 1..490: mol_type = genomic DNA
agagtttgatcctggctcagagcgaacgctggcggcatgcttaacacatgcaagtcgcacgaaggtttcggccttagtggcggacgggtgagtaacgcgtaggaatctatccatgggtgggggataactctgggaaactggagctaataccgcatgatacctgagggtcaaaggcgtaagtcgcctgtggaggagcctgcgttcgattagcttgttggtgaggtaacggcccaccaaggcgatgatacatagccggtctgagaggatgaacggccacattgggactgagacacggcccagactcctacgggaggcagcagtaaggaattttcggcaatggacgaaagtatgaccgagcaacgccgcgtgagtgatgaaggccttcgggtcgtaaagctctgtggtaagggaagaatactgtgaataggaaatgattcacagctgacggtacctttctagaaagtcacggcttactacgtgccagcagccg

SEQ ID NO: 9426 - DNA, 490 bp, unidentified
  misc_feature 1..490: note = Ascusbbf_1435498, encodes 16S rRNA
  source 1..490: mol_type = genomic DNA
agagtttgatcatggctcaggatgaacgctggcggcgtgcctaatacatgcaagtcgaacgaggtggaagggagcttgctcctggatgcctagtggcgaacgggtgcgtaacacgtaggtaacctgcccttaagcttgtgatacccagaggaaactttggctaataccggataacaacagaggaggcatctcctttgcttgaaaggcccttcacggggtcacttaaggatggacctgcggcgcattagctagttggtgagataaaggcccaccaaggcgaggatgcgtagccgccctgagagggggatcggccacatgggaaacgggacacggtccaaactcctaagggaggcagcagtaaggagttttcggcaatgggggaaaccctgaccgagcaacgccgcgtgagtgatgacggccctatgggttgtaaagagctgttgtaagggacgaacgatcggttaggaaaggaaacggttctgacagtacc

SEQ ID NO: 9427 - DNA, 481 bp, unidentified
  misc_feature 1..481: note = Ascusbbf_476144, encodes 16S rRNA
  source 1..481: mol_type = genomic DNA
agagtttgatcctggctcagaacgaacgctggcggcgtgcttaacacatgcaagttgaacgagaggcagtagcaatactgtagtaaagtagcagacgggtgagaaacacgtgggaaacttccttttagtaaagaatagcccagggaaacttggattaatactttatacgccctacgggggaaagatttatcgctaaaagatgtgcccgcgtaagattaggtagttggtggggtaatggcctaccaagcctacgatctttagctggtctgagaggatgatcagccacactgggactgagacacggcccagactcctacgggaggcagcagtggggaatattggacaatgggcgcaagcctgatccagcaacgccgcgtgaatgatgaaggccttcgggttgtaaagttcttttagcagggaagaaaatgacggtacctgcagaataagctccggctaacttcgtgccagcagccgcggtaat

SEQ ID NO: 9428 - DNA, 174 bp, unidentified
  misc_feature 1..174: note = Ascusbbf_472393, encodes 16S rRNA
  source 1..174: mol_type = genomic DNA
agagtttgatcatggctcagccatcagcaggatcttatgcgggacttcgccagcttccaagcgctcatggaaatcagcggcttgcggctgggcagaagtgatgcgcacctctgtctgcacgcgttcattcgccacatctttgacataccagtgatagccagcagccgcggtaat

SEQ ID NO: 9429 - DNA, 490 bp, unidentified
  misc_feature 1..490: note = Ascusbbf_1428425, encodes 16S rRNA
  source 1..490: mol_type = genomic DNA
agagtttgatcctggctcaggacgaacgctggcggcgtgcttaacacatgcaagtcgaacgatgaagctccagcttgctggggtggaagagtggcgaacgggtgagtaacacgtgagtaacctgcccatcacttcgggataagcgctggaaacggtgtctaatactggatatgacccatcaccgcatggtgtgtgggtggaaagatttattggtggtggatggactcgcggcctatcagcttgatggtggggtaatggcctaccatggcgacgacgggtagctggcctgagagggtgaccggccacactgggactgagacacggcccagactcctacgggaggcagcagtggggaatattgcacaatgggcgcaggcctgatgcagcaacgccgcgtgagggatgacggccttcgggttgtaaacctcttttagtagggaagaagcgcaagtgacggtacctgcagaaaaagcaccggctaactacgtgc

SEQ ID NO: 9430 - DNA, 490 bp, unidentified
  misc_feature 1..490: note = Ascusbbf_1432110, encodes 16S rRNA
  source 1..490: mol_type = genomic DNA
agagtttgatcctggctcaggacgaacgctggcggcgtggattaggcatgcaagtcgcgcgacggaccttcgggttacggagcggcgaacgggtgagtaacacgtgagaaacctaccgcatcattccggataattgatcgaaaggtcttgtaatacgggggaggttcgttgatgggcatccattgacgaacgaacgggcaaccggtgctgtgatggtctcgcggcttatcaggtagttggtggggtaacggcctaccaagcctacgacgagtagctggtctgagaggatggtcagccacattggtactgagacactgtccagactcctacgggaggctgcagtcgagaatcttgggcaatgcacgaaagtgtgacccagcgacgccgcgtgaaggatgaaggccctctgggtcgtaaacttcttttacgggagaagaagaactgacggtatcccgtgaataagccacggctaactacgtgccagcagccg

SEQ ID NO: 9431 - DNA, 490 bp, unidentified
  misc_feature 1..490: note = Ascusbbf_1151987, encodes 16S rRNA
  source 1..490: mol_type = genomic DNA
agagtttgatcctggctcaggatgaacgctagcggcaggcttaacacatgcaagtcgaggggtaacgggggcgcttgcgcccgccgacgaccggcgcacgggtgagtaacgcgtacactacctgcccaatggcgggggatagcccggggaaacccggattaaccccccatggtccccagagtgggcatccactttggggcaaacattcatggccattggatgggtgtgcgtcccattagcttgttggtaaggtaacggcttaccaaggcgatgatgggtaggggccctgagagggggatcccccacactggtactgagacacggaccagactcctacgggaggcagcagtgaggaatattggacaatgggcgggagcctgatccagccatgccgcgtgcgggaagacggccctatgggttgtaaactgcttttgtatggggataaagtgctccacgtgtggagttttgtaggtaccatacgaataaggac

SEQ ID NO: 9432 - DNA, 490 bp, unidentified
  misc_feature 1..490: note = Ascusbbf_1322198, encodes 16S rRNA
  source 1..490: mol_type = genomic DNA
agagtttgatcctggctcaggataaacgctggcggcgcacataagacatacaagtcgaacgaacttaatcgaaagtttacttttgaagcggttagtggcggactggtgagtaacgcgtaagcaatctgcctatcagaggggaataacagtgagaaatcattgctaataccgcataagctgtgagtatcgcatgatacacagagaaaaggagcaacccgctgattgatgagcttgcgtctgattagttagttggtggggtaacggcgtaccaagacgatgatcagtagccggactgagagggtaaacggccacatggggactgggatacgacccagacgcctccgggaggcagcagtcgggaatattgcgcaatggaagaaactctgacgcagtgacgctgcgggcaggaagaaggttttcggattgtaaactgctttagatagggaagaaaaaaatgacggtacctatagaataagctccggctaactac

SEQ ID NO: 9433 - DNA, 490 bp, unidentified
  misc_feature 1..490: note = Ascusbbf_1293565, encodes 16S rRNA
  source 1..490: mol_type = genomic DNA
cgagttttctcctttctccttctccccgcttgcggcgcacctaagacatgcaagtcaaacggacttaactcattcttaacgattgagagcggttagtggcggactggtgagtaatgtataagtaacctgcctatcagaggggaacaacagttggaaacgactgctaataccgcatatgccacgagaatcacatggttcaagtgggaaaggagcaatccgctgatagatggacttatatctgattagctagttggtggggtaacggcctaccaaggcgacgatcagtagccggactgagaggttaaacggccacattgggactgagatacggcccagactcctacgggaggcagcagtcgggaatattgcgcaatggaggaaactctgacgcagtgacgccgcgtgcaggaagaaggttttcggattgtaaactgctttagacagggaagaaaaaagacagtacctgtagaataagctccggctaactacg

SEQ ID NO: 9434 - DNA, 486 bp, unidentified
  misc_feature 1..486: note = Ascusbbf_1341741, encodes 16S rRNA
  source 1..486: mol_type = genomic DNA
agagtttgatcatggctcagaacgaacgctggcggcaggtcttaggcatgcaagtcgaacggacgacagagtggcttgccattctgcagttagtggcgcacgagtgagtaacgcgtgggcaactgcccttcactggggaataacgtctggaaacggacgctaataccgcatacgcccgcacggggaaagatttatcggtgatggatgtgcccgcgttggattcgcttgttggtggggtaatggcctaccaaggcgatgatccatagctggtctgagaggacgatcagccccgctggaacttggacacgggccagaatacgacgggaggcagaagctaagaatattgggcaatggaggaaactctgacccagccatgccgcgtgaatgaagaaggccttcgggttgtaaagttctttgagtcatgaagaggatgacagtagtgacagaaaaagcaccggctaacttcgtgccagcagccgcggtaat

SEQ ID NO: 9435 - DNA, 490 bp, unidentified
  misc_feature 1..490: note = Ascusbbf_590956, encodes 16S rRNA
  source 1..490: mol_type = genomic DNA
agagtttgatcctggctcaggatgaacgctggcggcgtgcttaacacatgcaagtcgaacggagctattttggaagcctccttcgggagacggaagatttagcttagtggcggacgggtgagtaacgcgtgagtaacctggcctcaagagggggacaacagctggaaacggctgctaataccgcataaggtaacggagtcgcatggctctgttactaaaggagcaatccgcttgaggatggactcgcgtctgattaggtagttggcggggtaacggcccaccaagccgacgatcagtagccggactgagaggttggccggccacattgggactgagacacggcccagactcctacgggaggcagcagtggggaatattgggcaatgggcgaaagcctgacccagcaacgccgcgtgaaggaagaaggccctcgggttgtaaacttctttgacaggggacgataatgacggtaccctgaaaacaagctccg

SEQ ID NO: 9436 - DNA, 490 bp, unidentified
  misc_feature 1..490: note = Ascusbbf_479587, encodes 16S rRNA
  source 1..490: mol_type = genomic DNA
agagtttgatcctggctcaggatcaacgctggcggcgtgcctaatgcatgcaagtcggacggggtcaccttcgggtggctcacgtggcggacgggtgaggaacacgtggggaagctgccgtgcgcacgggggtagccatcggaaacggtgggtaattccggatgcgctcgccgcccgggtaggggtggtgaggaaagatcttcggatcggcgcacgaggcacctgcggccgattagctggttggtggggtcacggctcaccaaggcgatgatcggtagctggtctgagaggacgatcagccacacggggactgagacacggccccgactcctacgggaggcagcagcaaggaattttccgcaatgggcgcaagcctgacgcagcaacgccgcgtgatcgagacgcttttcggagtgtaaagatctgtcagtggggacgaagaatgactgtacccacagaggaagcaccggctaactccgtgccagcagcc

SEQ ID NO: 9437 - DNA, 490 bp, unidentified
  misc_feature 1..490: note = Ascusbbf_760747, encodes 16S rRNA
  source 1..490: mol_type = genomic DNA
agagtttgatcatggctcagaacgaacgctggcggcgcgtcttaagcatgcaagtcgagcgggaggggcagcgatgccccgagagcggcggacgggtgagtaacgcgtggacaaccgaccctccggtgggggatagccgagcgaaagcgcggataataccgcatgagacggagcgggggcggccctgttccgggaaagcgcctgcgggcgcgccgggggacgggtctgcgtcccatcagctagacggcggggtgaaggcccaccgtggcgacgacgggtagccggcctgaaagggtgaacggccacattggaactgatacacggtccagactcctacaggaggcagcagtggggaatattgcgcaatgggggaaaccctaacgcagcgacaccatgtgaaggatgaaggccctagggttgtaaacttctgtctagaggaaagaatcaatgacggtacctctaaagaaagcaccggctaactccgtgccag

SEQ ID NO: 9438 - DNA, 489 bp, unidentified
  misc_feature 1..489: note = Ascusbbf_1695477, encodes 16S rRNA
  source 1..489: mol_type = genomic DNA
agagtttgatcctggctcaggatgaacgctggcggcgtgcctaacacatgcaagtcgagcgattctcttaggagaagagcggcggacgggtgagtaacgcgtgggtaacctgccctgtacacactgataacataccgaaaggtatgctaatacgggataatatattttgatggcatcatcgaaatatcaaagctccggcggtacaggatgggcccgcgtctgattagctagttggtggggtaatggctcaccaaggcgacgatcagtagccgacctgagagggtgatcggccacattggaactgagacacggtccaaactcctacgggaggcagcagtggggaatattgcacaatgggcgaaagcctgatgcagcaacgccgcgtgagcgatgaaggccttcgggtcgtaaagctctgtcctcaaggaagataatgacggtacttgaggaggaagccccggctaactacgtgccagcagccgcggtaat

SEQ ID NO: 9439 - DNA, 490 bp, unidentified
  misc_feature 1..490: note = Ascusbbf_976186, encodes 16S rRNA
  source 1..490: mol_type = genomic DNA
agagtttgatcctggctcagattgaacgctggcggcatgcttaacacatgcaagtcgaacggcagcatgatctagcttgctagattgatggcgagtggcggacgggtgagtaacgcgtaggaatatgccttgaagcgggggataacctgaggaaactcaggctaataccgcataatctctgcggagaaaagctggggaccttatggcctggcgcttcaagaatagcctgcgttcgattagctagttggtagggtaaaggcctaccaaggcgacgatcgatagctggtctgagaggatgatcagccacactgggactgagacacggcccagactcctacgggaggcagcagtggggaatattggacaatgggggcaaccctgatccagcaatgccgcgtgtgtgaagaaggcctgagggttgtaaagcactttcagtggggaggaggcttgataggttaagagctaattaagtggacgttacccacagaag

SEQ ID NO: 9440 - DNA, 490 bp, unidentified
  misc_feature 1..490: note = Ascusbbf_623928, encodes 16S rRNA
  source 1..490: mol_type = genomic DNA
agagtttgatcctggctcaggatgaacgctagcgacaggcttaacacatgcaagtcgaggggcagcgcggaggtagcaatacttctggcggcgaccggcgcactggtgagtaacacgtatgcgacctgccccggacagggggataaacccgggaaactgggcctaataccccatatgccctgagggtgcatgcccttggggtgaaagatccgtcggtccgggatgggcatgcggcgcattagctggttggcggggcaacggcccaccaaggcgacgatgcgtaggggttctgagaggaaggtcccccacactggtactgagacacggaccagactcctacgggaggcagcagtgaggaatattggtcaatggacggtagtctgaaccagccatgccgcgtgcgggaggacggccctatgggttgtaaaccgcttttgagtgagagcaataaggatcatgagtggtccgatgagagtatcattcgaataag

SEQ ID NO: 9441 - DNA, 490 bp, unidentified
  misc_feature 1..490: note = Ascusbbf_1519217, encodes 16S rRNA
  source 1..490: mol_type = genomic DNA
agagtttgatcctggctcagaacgaacgctggcggcatgcctaacacatgcaagtcgaacgagaccttcgggtctagtggcgcacgggtgcgtaacacgtgggaacctgcccttaggttcggaataactcaccgaaaggtgtgctaataccggataatgtcttcggaccaaagatttatcgcctttggatgggcccgcgtaggattagctagttggaggggtaacggcccaccaaggcgacgatcagtagccggtctgagaggatgaacggccacattgggactgagacacggcccagactcctacgggaggcagcagtggggaatcttccgcaatggacgaaagtctgacggagcaacgccgcgtgaacgatgacgaccttcgggttgtaaagttctgttatacgggacgaatggcgcaacggtcaatacccgttgcgagtgacggtaccgtaagagaaagccacggctaactacgtgccagcagccgc

SEQ ID NO: 9442 - DNA, 480 bp, unidentified
  misc_feature 1..480: note = Ascusbbf_1606480, encodes 16S rRNA
  source 1..480: mol_type = genomic DNA
agagtttgatcctggctcaggatgaacgctggcggcatgcctaatacatgcaagtcgtgcgagaaactaccttagggtggcggaaagcggcggacgggtgagtaacgcgtagaaacataccccaaggtgagggataagcatcggaaacggtgtctaataccgcatactgtctacggacaaaagatttatcgccatgggaatggtctgcgtctgattagctagttggtagggtaaaggcctaccaaggcgatgatcagtagctggtttgagaggatgatcagccacactggaactgagacacggtccagactcctacgggaggcagcagtagggaattttccacaatgggcgaaagcctgatggagcaatgccgcgtgcgggatgaaggttttcggactgtaaaccgcttttatatatgaagattatgacggtaatatatgaataaggatcggctaactacgtgccagcagccgcggtaat

SEQ ID NO: 9443 - DNA, 490 bp, unidentified
  misc_feature 1..490: note = Ascusbbf_1688030, encodes 16S rRNA
  source 1..490: mol_type = genomic DNA
agagtttgatcctggctcagaaccaacgctggcggcaggcttaacacatgcaagtcgagcgcctcgcaaggggagcggcagacgggtgagtcacacgtgggaatctacccatccctgcggaacaactccgggaaactggagctaataccgcatacgccctacgggggaaagatttatcggggatggatgagcccgcgttggattagttagttggtgaggtaagggcccaccaagacgatgatgcgtagccggcctgagagggtgaacggccacattgggactgagacacggcccagactcctacgggaggcagcagtggggaatcttccgcaatgggcgaaagcctgacggagcaatgccgcgtgagtgatgaaggaattcgttccgtgaagctcttttgtttatgacgaatgtgcagactgtgaataatggtttgtaatgacggtagtaaacgaataagccacggctaactacgtgccagcagccgcgg

SEQ ID NO: 9444 - DNA, 490 bp, unidentified
  misc_feature 1..490: note = Ascusbbf_1324633, encodes 16S rRNA
  source 1..490: mol_type = genomic DNA
agagtttgatcctggctcaggatgaacgctagcggcaggcttaacacatgcgagtcgaggggcagcgcggggtagcaatactctggcggcgaccggcggaagggtgcgtaacgcgtgagcaacttgcccgtcactgggggataggcactggaaacggtgtgtaatactccataacatatggattcacatggatttatattgaaagattcgttggtgacggatggtctcgcgtaacattagctagtcggcggggtaacggcccaccgaggctacgatgtttaggggttctgagaggaaggtcgccgaacctggacctgagacaggatccaggctcctacgggaggaagcagtgaggaatattggtcaatgggcggaagcctgaagcagccatgcagcgtgcaggaataaggccctatgggtcgtaaactgcttttccttgagggcaataagggtcacgtgtggcccgatgagagtatcaggggaataagca

SEQ ID NO: 9445 - DNA, 474 bp, unidentified
  misc_feature 1..474: note = Ascusbbf_1679807, encodes 16S rRNA
  source 1..474: mol_type = genomic DNA
agagtttgatcatggctcaggatgaacgctggcggcgtgcctaaggtatgcaagtcgaccggaaacacttcgggtgtcgaggggcggacggctgagtaacacgtaggaatgtaccccagactgagggataagcaccggaaacggtgtctaataccgcataacctcttcggagaaaagcttcggcggtttgggaacagcctgcgcaagaatagcttgttggtgaggtaaaggctcaccaaggcgatgatctttagctggtctgagaggatgatcagccagactgggactgagacacggcccagacccctacggggggcagcaactaggaatcttccacaatggacgaaagtctgatggagcaacgccgcgtgcaggatgaaggccttcgggttgtaaactgcttttttctgtgatgattatgacagtagcagacgaataaggatcggctaactctgtgccagcagccgcggtaat

SEQ ID NO: 9446 - DNA, 186 bp, unidentified
  misc_feature 1..186: note = Ascusbbf_1272836, encodes 16S rRNA
  source 1..186: mol_type = genomic DNA
agagtttgatcctggctcagcgcctcccccacgctcttttcacagtgcatcaccgggatgggcaggcccagatcctttaagaaccgggccagggcttccacctgatcgtaccaggaatcgtacatcatgaattccagcccgtcgcagcgcaggtttttcccgcagcccgccagcagccgcggtaat

SEQ ID NO: 9447 - DNA, 490 bp, unidentified
  misc_feature 1..490: note = Ascusbbf_1322620, encodes 16S rRNA
  source 1..490: mol_type = genomic DNA
agagtttgatcctggctcaggatgaacgctggcggcgtgcttaacacatgcaagtcgaacggacggtagtaatactgtcagtggcggacgggtgaggaacacgtagctgacctgccttatagtttgggataacgtctcgaaagagacgctaataccggataagctgttgtgtaatagcgatgcaacaggaaaggggaaacccgctaaaagagggggctgcgacctatcaggtagttggtggggtaaaagcctaccaagccgacgacgggtaaggggtctgagaggatgacccctcacactgggactgagacacggcccagactcctacgggaggcagcagtgaggaatattgcacaatgggggaaaccctgatgcagcgacgccgcgtgggtgaagaaggtcttcggatcgtaaagccctttttggcatgacgagagaaggacggtagtgccagaataagcctcggctaactacgtgccagcagccgcgg

SEQ ID NO: 9448 - DNA, 490 bp, unidentified
  misc_feature 1..490: note = Ascusbbf_1252668, encodes 16S rRNA
  source 1..490: mol_type = genomic DNA
agagtttgtcctggctcaggatgaacgctagcggcaggcctaacacatgcaagtcgaggggcagcacgtaaagtagtttactacttttggtggcgaccggcgcacgggtgcgtaacgcgtatataacctgcttcgaactgggggataattcggagaaatctggtctaataccctataacatccgggaaggcatcttcctgggttgaaagctccggcggttcgagatggatatgcgtgacattaggtagttggtgaggtaacggctcaccaagcctacgatgtctagggggactgagaggttaaccccccacactggtactgagacacggaccagactcctacgggaggcagcagtgaggaatattggtcaatggacgcaagtctgaaccagccatgccgcgtgcaggaagacggctctatgagttgtaaactgcttttgtataagggtaaacccaggtacgtgtacctggctgaaagtactatacgaata

SEQ ID NO: 9449 - DNA, 182 bp, unidentified
  misc_feature 1..182: note = Ascusbbf_1459649, encodes 16S rRNA
  source 1..182: mol_type = genomic DNA
agagtttgatcctggctcagtggtaacgaacccgactagtatccatggggctgtgggttcaatccctggcctcacacagtgggctaaggatctggcactgccatgagcaatggcatagatcacagatgtggctcaaatcccacgttgctgtggttatggtgtaggccagcagccgcggtaat

SEQ ID NO: 9450 - DNA, 395 bp, unidentified
  misc_feature 1..395: note = Ascusbbf_1341638, encodes 16S rRNA
  source 1..395: mol_type = genomic DNA
taagcactccgtggacagatttgtcattgtgagcattttcatcccgaagttgcggctcattctgattctgaacagcttcttgggaagtagcgacagcttggtttttagtgagttgttccattctttagctcctagacctttagcagcaaggtccatatctgactttttgttaacgtatttagccacatagaaaccaacagccatataactggtagctttaagcggctcacctttagcatcaacaggccacaaccaaccagaacgtgaacaagcggcctgcgtgtagcgagctgtgatgggcatactggaaccagaataccacggatctcgcgaggcttttaacaggcggcggatgcatacgcgacgaccaaaactaggctcgacgccaccggaag

SEQ ID NO: 9451 - DNA, 490 bp, unidentified
  misc_feature 1..490: note = Ascusbbf_1445370, encodes 16S rRNA
  source 1..490: mol_type = genomic DNA
agagtttgatcctggctcaggatgaacgctagctacaggcttaacacatgcaagtcgaggggcagcataacgaaagcttgcttttgttgatggcgaccggcgcacgggtgagtaacgcgtatccaaccttcccctgaggagggcatagcccggcgaaagtcggaggaataccctatgttttccgttgaggacatctgaagtggaacaaagatttatcgctaagggatggggatgcgtcggattaggttggtggcggggtaacggcccaccaagccatcaagcagtaggggttctgagaggaagggccccatcatgcgtactgagccccggcccaaactcctacgggaggcagcagtgacgaatattcgtcactgggcgagagcctgaaccagccaagtagcgtgcaggatgacggccctatgggtggtaaactgcttttgcatgggaataaagtgagggacgtgtccctttttgtatgtaccatgagaat

SEQ ID NO: 9452 - DNA, 490 bp, unidentified
  misc_feature 1..490: note = Ascusbbf_1435666, encodes 16S rRNA
  source 1..490: mol_type = genomic DNA
agagtttgatcctggctcaggatgaacgctagcggcaggcttaacacatgcaagtcgaggggtaacgcggggtagcaatactctggcgacgaccggcgcacgggtgcgtaacgcgtatgcaacctacctgtaacaggggtacaacggagagaaatttccactaatcctccatattgttagagattcgcatgtttctctaacgaaagcttcggtggttacggatgggcatacgtgacattagctagttggtagggtaacgccataccaaggcgacgatgtctaggggagctgagaggcttatcccacacacgtgtacggagacacggaccagggtcctacaggaggcagcggtgaggaatgttggtcgatggacggaagactgaaccagccatgcagcgtggaggaagaaggtccgatgggttgtaaaatccttttgttcgagagtaataagaggcttgcgagcatcgatgagagtatcggacggataagc

SEQ ID NO: 9453 - DNA, 490 bp, unidentified
  misc_feature 1..490: note = Ascusbbf_1617010, encodes 16S rRNA
  source 1..490: mol_type = genomic DNA
agagtttgatcctggctcaggatgaacgctagcgataggcctaacacatgcaagtcgaggggcagcaaggggtagcaatactctgttggcgaccggcgcacgggtgagtaacgcgtatgcaacctacctactacaggggaataacccggagaaattcggactaataccgcataatacaggggtcccgcatgggaatatttgttaaagatttatcggtagtagatgggcatgcgttccattagccagttggtgaggtaacggctcaccaaagcaacgatggataggggaactgagaggtttatcccccacactggaactgagacacggaccagactcctacgggaggcagcagtgaggaatattggtcaatggacgagagtctgaaccagccaaatcgcgtgaaggaagactgccttatgggttgtaaacttcttttatacaggaataaaaagagttacgtgtaacttattgcatgtactgtatgaataag

SEQ ID NO: 9454 - DNA, 490 bp, unidentified
  misc_feature 1..490: note = Ascusbbf_1445945, encodes 16S rRNA
  source 1..490: mol_type = genomic DNA
agagtttgatcctggctcaggataaacgctggcggcgaacataagacatgcaagtcgaacggacggaactcattcgtaacgattgagagcggggaggggcggacgggggaggaagggagaaggaacctgccgatcagaggggaacaacagtgggaaacgactgctaataccgcatatgccacgagaatcacatggttcaagagggaaaggagcaatccgcggatagatggactgatatctgattagctagttggtggggtaacggcctaccaaggcgacgatcagtagccggactgagaggttaaacgtccacattgggactgggctacggccacgactcctacgggaggcagcagtcgggaatattgcgcaatggaggaaactctgacgcagtgccgccgcgtgcaggaagaaggttttcggattgtaaactgctttagacagggaagaaaaaagacagtacctgtagaataagctccggctaactacg

SEQ ID NO: 9455 - DNA, 490 bp, unidentified
  misc_feature 1..490: note = Ascusbbf_1322152, encodes 16S rRNA
  source 1..490: mol_type = genomic DNA
agagtttgatcctggctcaggataaacgctggcggcgcacataagacatgcaagtcgaacgaacttaatcgaaagtttacttttgaagcggttagtggcggactggtgagtaacgcgtaagcaatctgcctatcagaggggaataacagcgagaaatcattgctaataccgcataagctgtgagtatcgcatgatacaatagaaaaggagcaatacgctgatagatgagcttgcgactgattagttagttggtggggtaacggcctaccaagacgatgatcagtagccggactgagaggttagacggccacgaagggactgagagagggcgcagtcgggaacatggggcagcaggcgggaatattgcgcaatggaggagactctgacggagtgacgccgcgtgcgggaagaaggtttgcggattgtaaactgctttagatagggaagaaaaaaaatgacggtacctatagaataagcaccggctaactac

SEQ ID NO: 9456 - DNA, 480 bp, unidentified
  misc_feature 1..480: note = Ascusbbf_140793, encodes 16S rRNA
  source 1..480: mol_type = genomic DNA
agagtttgatcctggctcagaacgaacgctggcggcatgcctaacacatgcaagtcgaacgagggccccgcttcggtgggaccctagtggcgcacgggtgagtaacgcgtgggaacctgccctgtggtacggaataactccgggaaactggagctaataccgtatgcgtcctgcgggacaaagatttatcgccatgggatgggcccgcgtaggattagcttgttggtggggtaacggcctaccaaggcttcgatccttagctggtctgagaggatgatcagccacactgggactgagacacggcccagactcctacgggaggcagcagtggggaatattggacaatgggcgcaagcctgatccagcaatgccgcgtgagtgatgaaggccttcgggttgtaaagctctttcgcacgcgacgatgatgacggtagcgtgagaagaagccccggctaacttcgtgccagcagccgcggtaat

SEQ ID NO: 9457 - DNA, 490 bp, unidentified
  misc_feature 1..490: note = Ascusbbf_285367, encodes 16S rRNA
  source 1..490: mol_type = genomic DNA
agagtttgatcctggctcagaacgaacgctggcggcgtggattaggcatgcaagtcgaacgagaatctagggaatcaagttttcggacaaggttcgctggaggaaagtggcggaagggtgagtacaacatgggcaatccatctccaagttgggtataactccgcgaaagcggggataatcccgaatgtggtgagccggggcatcccggcgaaactaaaggtggggaccgcaaggcctgccgcttggagccgagcccgtgcactatcagcttgttggcgaggtaacggcccaccaaggctatgacggttagctggtctgagaggatggtcagccacactgggactgagatactgcccagactcctacgggaggctgcagtcgagaatcattcgcaatgggcgaaagcctgacggtgcgacgtcgcgtggaggatgaaggtcttcggattgtaaactcctgtcatgtggaataaacggcctctgtgcgaaca

SEQ ID NO: 9458 - DNA, 490 bp, unidentified
  misc_feature 1..490: note = Ascusbbf_124132, encodes 16S rRNA
  source 1..490: mol_type = genomic DNA
agagtttgatcatggctcagattgaacgctggcggcatgctttacacatgcaagtcgaacggtaacaggccttcgggtgctgacgagtggcgaacgggtgagtaatgcatcggaacgtgcccagaggtgggggataacgcagcgaaagctgtgctaataccgcatgtgatctgaggatgaaagcgggggaccaagcagcaatgtttggcctcgcgcctctggagcggccgatgtcagattaggtagttggtggggtaaaggcctaccaagccgacgatctgtagctggtctgagaggacgaccagccacactgggactgagacacggcccagactcctacgggaggcagcagtggggaattttggacaatgggcgcaagcctgatccagcaatgccgcgtgcgggaagaaggccttcgggttgtaaaccgcttttgtacggaacgaaaaggctctggctaatacctggggctgatgacggtaccgtaaga

SEQ ID NO: 9459 - DNA, 490 bp, unidentified
  misc_feature 1..490: note = Ascusbbf_180459, encodes 16S rRNA
  source 1..490: mol_type = genomic DNA
agagtttgatcctggctcaggattaacgctggcggcgtgcataacacatgcaagtcgaacgatgaaacttagtagacttcttcggaaagacactaagcggattagtggcgaacgggtgagtaacgcgtgagtaacctgccttacacaaggggatagcctttggaaacgaagaataataccctataaaactataaaagcacatgctagaatggtcaaagtgctagcggtgtaagatggacttgcgtctgattagctagttggtgagataaaagctcaccaaggcaacgatcagtagccggcttgagagagtgtacggccacattgggactgagacacggcccagactcctacgggaggcagcagtggggaattttgcacaatgggggaaaccctgatgcagcgacgccgcgtgatttagaaggccttcgggttgtaaaaatcttttgtataggaagaaaatgacagtactatacgaataaggtccggctaa

SEQ ID NO: 9460 - DNA, 490 bp, unidentified
  misc_feature 1..490: note = Ascusbbf_233676, encodes 16S rRNA
  source 1..490: mol_type = genomic DNA
agagtttgatcctggctcaggacgaacgctggcggcgcgcctaacacatgcaagtcgaacggagtttgagagagcttgctttttcaaacttagtggcgaacgggtgagtaacgcgtgagtaacctgccctggagtgggggacaacagttggaaacgactgctaataccgcataagcccacagtgccgcatggcacagcgggaaaaggatttattcgcttcaggatggactcgcgtccaattagctagttggtgaggtaacggcccaccaaggcgacgattggtagccggactgagaggttgaacggccacattgggactgagacacggcccagactcctacgggaggcagcagtgggggatattgcacaatgggggaaaccctgatgcagcgacgccgcgtggaggaagaaggttttcggattgtaaactcctgtcgttagggacgataatgacggtacctaacaagaaagcaccggctaactacgtgcc

SEQ ID NO: 9461 - DNA, 490 bp, unidentified
  misc_feature 1..490: note = Ascusbbf_183693, encodes 16S rRNA
  source 1..490: mol_type = genomic DNA
agagtttgatcctggctcaggatgaacgctagcggcaggcttaacacatgcaagtcgaggggcagcgcggggtagcaataccctggcggcgaccggcgcacgggtgcgtaacgcgtatgcaacctacctgtgacagggggataacggtgcgaaagcgccactaataccccatattgacggggtcccgcatggggttccgacgaaagctttctgtggtcacggatgggcatgcgtggcattaggtagttggcggggtaacggcccaccaagccgacgatgcctaggggggctgagaggcctgacccccacactggtactgagacacggaccagactcctacgggaggcagcagtgaggaatattggtcaatgggcggaagcctgaaccagccatgccgcgtgagggatggaggccctatgggttgtaaacctcttttagccgggagtaataagggcggtgcgccgtccgatgagagtaccggcggaataag

SEQ ID NO: 9462 - DNA, 490 bp, unidentified
  misc_feature 1..490: note = Ascusbbf_1711763, encodes 16S rRNA
  source 1..490: mol_type = genomic DNA
agagtttgatcatggctcagaacgaacgctggcggcaggcctaacacatgcaagtcgagcgtgaaaggggcttcggccctgagtaaagcggcgcacgggtgagtaacacgtgaataatctgcccttgagaccgggataacagaccgaaaggactgctaataccggataagcccacgaatcaaccgggtttgtgagaaaagagcgggaaccttcgggtccgttcacttgaggatgagttcgcgtcccattagatagttggtgaggtaatggctcaccaagtcgacgatgggtagctggtctgagaggatgatcagccacactggaactgagacacggtccagactcctacgggaggcagcagtggggaattttgcgcaatgggggaaaccctgacgcagccatgccgcgtgagtgatgaaggccttcgggttgtaaagctccgtttaaggggacgaacgtccgctgtgacaacaacgcagcggagtgacgg

SEQ ID NO: 9463 - DNA, 486 bp, unidentified
  misc_feature 1..486: note = Ascusbbf_83640, encodes 16S rRNA
  source 1..486: mol_type = genomic DNA
agagtttgatcctggctcagaacgaacgctggcggcacgcttaacacatgcaagtcgaacggagttatggggcttgctccataacttagtggcggacgggtgagtaacacgtgggaacatgtccgtttgtggtggatagcttcgggaaactgaagataatacagcataagctcgagagaggaaaggtcgcaagatcgcagacggagtggcccgcggctgattaggtagttggtggggtaatggcctaccaagccaatgatcagtagctggtctgagaggacggacagccacactgaaactgagatacggttcagactcctacgggaggcagcagtggggaatattggacaatgggggcaaccctgatccagcgatgccgcgtgagtgatgaaggtcttaggattgtaaagctcttttgacagggaagataatgacggtacctgtagaataagcaccggctaactctgtgccagcagccgcggtaat

SEQ ID NO: 9464 - DNA, 490 bp, unidentified
  misc_feature 1..490: note = Ascusbbf_491384, encodes 16S rRNA
  source 1..490: mol_type = genomic DNA
agagtttgatcctggctcaggacgaacgctggcggcgtgcttcatacatgcaagtcgaacgataaggcgtcttcggacgtacataagtggcggacgggtgagtaatgtgtagataatctgccctagagatggggacaacagttggaaacgactgctaatacccaatatgcgcgtacttgagatagtattcgtgaaaactccggtgctctgggatgagtctgcatctgattagctagttgggggtgtaatggaccaccaaggcgacgatcagtagctggtttgagaggatgatcagccacaatgggactgagacacggcccatactcctacgggaggcagcagtagggaattttgcgcaatggggggaaccctgacgcagcaacgccgcgtgattgatgaagcccttcggggtgtaaagatctgtcagtggggacgaagaatgacggtacccacagaggaagcatcggctaactccgtgccagcagccgcg

SEQ ID NO: 9465 - DNA, 221 bp, unidentified
  misc_feature 1..221: note = Ascusbbf_74946, encodes 16S rRNA
  source 1..221: mol_type = genomic DNA
agagtttgatcctggctcaggacgaacgctggcggcgtgcttcatacatgcaagtcgaacgagaagttaccttcgggtaatggacagtggcggacgggtgagtaaaatgtagagaatctgcccttgagatggggacaacagttggaaacgactgctaatacccaatatgcgcgtagttgagatactattcgtgaaaactccgtgccagcagccgcggtaat

SEQ ID NO: 9466 - DNA, 490 bp, unidentified
  misc_feature 1..490: note = Ascusbbf_1444376, encodes 16S rRNA
  source 1..490: mol_type = genomic DNA
agagtttgatcctggctcaggatgaacgctagcggcaggcttaacacatgcaagtcgaggggtaacgcggggtagcaatactctggcgacgaccggcgcacgggtgcgtaacgcgtatgcaacctacctgtaacaggggtataacggagagaaatttccactaatcccccatattgttattctttcgcatgttaggataacgaaagcttcggtggttacggatgggcatgcgtgacattagctagttggtaaggtaacggcttaccaaggcgacgatgtctaggggagctgagaggcttatccccaacacaggtacggagacagcgaacatattcctacgggaggaagccgtgaggaatattggtcaatggacggaagtcggaacaagccatgccgcgtggaggaagaaggtcctatgggttgtaaactccttttgttcgagagtaataagggctttgcgaagcccgatgagagtatcggacgaataagc

SEQ ID NO: 9467 - DNA, 490 bp, unidentified
  misc_feature 1..490: note = Ascusbbf_713855, encodes 16S rRNA
  source 1..490: mol_type = genomic DNA
agagtttgatcatggctcaggacgaacgctggcggcgtgcctaacacatgcaagtcgaacgagaatttagcggatgattccttcgggatgaatttgctgaaggaaagtggcggacgggcgagtaacgcgtgaataacctgcccataagagggggataatccgtggaaacgcggactaataccgcatattgagtgattatcgcatggtttttacttgaaagattttatcgcttatggatggattcgcgtcagattagatagttggtgaggtaacggctcaccaagtcaacgatctgtagccgaactgagaggttgatcggccgcattgggactgagacacggcccagactcctacgggaggcagcagtggggaatattgcgcaatgggggaaaccctgacgcagcaacgccgcgtgcaggaagaaggtcttcggattgtaaactgttgtcctctgtgacgataatgacggtagcagaggaggaagccacgg

SEQ ID NO: 9468 - DNA, 490 bp, unidentified
  misc_feature 1..490: note = Ascusbbf_384622, encodes 16S rRNA
  source 1..490: mol_type = genomic DNA
agagtttgatcatggctcagattgaacgctggcggcatgccttacacatgcaagtcgaacggcagcggggacttcggtccgccggcgagtggcgaacgggtgagtaaagtatcggaacgtacctttcagtgggggataacgtagcgaaagttacgctaataccgcatattctgtgagcaggaaagcaggggatcgcaagaccttgcgctgattgagcggccgatatcagattagctagttggtggggtaaaggcctaccaaggcgacgatctgtagcgggtctgagaggatgatccgccacactggaactgagacacggtccagactcctacgggaggcagcagtggggaattttggacaatgggggcaaccctgatccagccatgccgcgtgagtgaagaaggccttcgggttgtaaagctctttcggccgggaagaaatcgcgcaggctaataccctgtgtggatgacggtaccggaataagaagcac

SEQ ID NO: 9469 - DNA, 490 bp, unidentified
  misc_feature 1..490: note = Ascusbbf_102375, encodes 16S rRNA
  source 1..490: mol_type = genomic DNA
agagtttgatcatggctcaggacgaacgctggcggcgtgcctaacacatgcaagtcgaacggacttaaggagcttgctctttaagttagtggcggacgggtgagtaacgcgtgagcaacctgccttacagagggggataacgtttggaaacgaacgctaataccgcataagatggagaagtcgcatggctttttcaccaaaggagtaacatccgctgtaagatgggctcgcgtccgattagatagttggcggggtaacggcccaccaagtcgacgatcggtagccggactgagaggttgaacggccacattgggactgagacacggcccagactcctgcgggaggcagcagtgagggatattgcacaatgggcgaaagcctgatgcagcaacgccgcgtgagtgatgacggtcttcggattgtaaagctctgttcttggtgaagataatgactttagccaaggagaaagccacggctaactacgtgccag

SEQ ID NO: 9470 - DNA, 490 bp, unidentified
  misc_feature 1..490: note = Ascusbbf_143170, encodes 16S rRNA
  source 1..490: mol_type = genomic DNA
agagtttgatcatggctcaggacgaacgctggcggcgcgcctaacacatgcaagtcgaacggtttcatattgagcttgcttgatatgagatagtggcggacgggtgagtaacacgtgagcaacctggctataggagggggatagcgtctggaaacggacggtaataccgcatgatatctagataaggcatcttagatagatcaaagggaggagactctgccgatagatgggctcgcgactgattaggtagttggtgtggtaacggcataccaagccgatgatcagtagccggactgagaggttgaacggccacattgggactgagatacggcccagactcctacgggaggcagcagtgggggatattgcacaatggagggaactctgatgcagcgacgccgcgtgagggaagacggttttcggattgtaaacctctgtcttatgggaagaagaggatgacggtaccataagaggaagccacggctaacta

SEQ ID NO: 9471 - DNA, 490 bp, unidentified
  misc_feature 1..490: note = Ascusbbf_445636, encodes 16S rRNA
  source 1..490: mol_type = genomic DNA
agagtttgatcctggctcagaacgaacgctggcggcgtgcctaacacatgcaagtcgcgcgcgaagggcttcggccttgtagagcggcgcacgggtgagtaacacgtgggtaatctacccttaggtctggaataactcagggaaacttgagctaataccggataagaccacgagacgaaggtcttgtgggaaaagtggaggatctcttcggagacttcgcgccaaaggatgagcccgcgtcccatcaggtagttggcggggtaacggcccaccaagcctaagacgggtagctggtctgagaggatgatcagccacactggaactgagacacggtccagactcctacgggaggcagcagtggggaatcttgcgcaatggacgaaagtctgacgcagcaacgccgcgtgagtgatgaaggtcttcggatcgtaaagctctgtcggcaggaacgatggatagtgtggataacacctacgctatctgacggtac

SEQ ID NO: 9472 - DNA, 490 bp, unidentified
  misc_feature 1..490: note = Ascusbbf_536154, encodes 16S rRNA
  source 1..490: mol_type = genomic DNA
agagtttgatcctggctcaggacgaacgctggcggcgcgcctaacacatgcaagtcgaacggagcttttcagagcttgctttgaaaagcttagtggcgaacgggtgagtaacgcgtgagtaacctgccctcgagtgggggacaacagttggaaacgactgctaataccgcataagaccacggagccgcatggctcaggggtaaaaggatttattcgcttgaggatggactcgcgtccaattagctagttggtgaggtaacggcccaccaaggcgacgattggtagccggactgagaggttgatcggccacattgggactgagacacggcccagactcctacgggaggcagcagtgggggatattgcacaatgggggaaaccctgatgcagcgacgccgcgtgaaggaagaaggccttcgggttgtaaacttctgtcgtacgggacgataatgacggtaccgtacaagaaagccacggctaactacgtgcc

SEQ ID NO: 9473 - DNA, 153 bp, unidentified
  misc_feature 1..153: note = Ascusbbf_50031, encodes 16S rRNA
  source 1..153: mol_type = genomic DNA
agagtttgatcctggctcaggacgaagtgaagaaggttttcggatcgtaaaactctgttgttagagaagaacaaggatgagagtaactgttcatcccttgacggtatctaaccagaaagccacggctaactacgtgccagcagccgcggtaat

SEQ ID NO: 9474 - DNA, 490 bp, unidentified
  misc_feature 1..490: note = Ascusbbf_400565, encodes 16S rRNA
  source 1..490: mol_type = genomic DNA
agagtttgatcatggctcaggacgaacgctggcggcacgcttaacacatgcaagtcgaacggagttgtattagcttgctaatataacttagtggcggacgggtgagtaacacgtgagcaacctgccttcgagagtggaataatgtctggaaacggacactaataccgcatgacatacaggattcgcatgttttctgtatcaaagatttatcgctcgaagatgggctcgcgtccgattagctggttggtgaggtaacggctcaccaaggcgacgatcggtagccgtactgagaggtagaacggccacattgggactgagacacggcccagactcctacgggaggcagcagtggggaatattgcacaatggaggaaactctgatgcagcgatgccgcgtgagggaagaaggcatttttgttgtaaacctctgttatcagggacgataatgacggtacctgaggaggaagctccggctaactacgtgccagca

SEQ ID NO: 9475 - DNA, 311 bp, unidentified
  misc_feature 1..311: note = Ascusbbf_701892, encodes 16S rRNA
  source 1..311: mol_type = genomic DNA
agagtttgatcatggctcagattgaacgctggcggcaggcttaacacatgcaaccgatgatctctagctggtttgagaggacaatcagccacattggaattgagaaacggaccaaactcctacgggaggcagcagtggggaatattgcacaatgggggaaaccctgatgcagccatgccacgtgtgtgaagaaggccttcgggttgtaaagcacttttgcattcgaggaagacggcgtataaataaatgcgctatttgacgttagagtgtgaataagcaccggcaaactccgtgccagcagccgcggtaat

SEQ ID NO: 9476 - DNA, 490 bp, unidentified
  misc_feature 1..490: note = Ascusbbf_457753, encodes 16S rRNA
  source 1..490: mol_type = genomic DNA
agagtttgatcatggctcaggacgaacgctggcggcgtgcctaacacatgcaagtcgaacgagaatctgcggacggaggcttcggccaactgaaacagaggaaagtggcgaacgggtgagtaacgcgtgaggaacctgcctcggagtgggggacaacagttggaaacgactgctaataccgcataatatgcctgaaggacatccttccgggcatcaaagctttatgtgctctgagatggcctcgcgtctgattagatagttggcggggtaacggcccaccaagtcgacgatcagtagccggtctgagaggatgaacggccacattgggactgagatacggcccagactcctacgggaggcagcagtggggaatattgggcaatgggcgaaagcctgacccagcaacgccgcgtgaaggaagaaggctttcgggttgtaaacttcttttaccagggacgaaggacgtgacggtacctggagaaaaagccac

SEQ ID NO: 9477 - DNA, 490 bp, unidentified
  misc_feature 1..490: note = Ascusbbf_205648, encodes 16S rRNA
  source 1..490: mol_type = genomic DNA
agagtttgatcatggctcaggacgaacgctggcggcacgcttaacacatgcaagtcgaacggagttattgagagcttgctttcgataacttagtggcggacgggtgagtaacacgtgagcaacctgccttcaagagcggaatagcttctggaaacggatggtaataccgcataacattacgttaccgcatggtagtgtaatcaaagatttatcgcttgaagatgggctcgcgtctgattagatagttggtggggtaacggcctaccaagtcgacgatcagtagccggactgagaggttgaacggccacattgggactgagacacggcccagactcctacgggaggcagcagtggggaatattgcacaatgggcgcaagcctgatgcagcgatgccgcgtggaggaagaaggttttcggattgtaaactccttatctgagggacgataatgacggtacctcaggagaaagctccggctaactacgtgccag

SEQ ID NO: 9478 - DNA, 485 bp, unidentified
  misc_feature 1..485: note = Ascusbbf_220826, encodes 16S rRNA
  source 1..485: mol_type = genomic DNA
agagtttgatcctggctcaggataaacgctggcggcgtgcctaatgcatgcaagtcgaacgatccttcgggatagtggcagacgggtgagtaacgcgtaagtgacctgtccgtgagtggggaataactgcccgaaagggtagctaattccgcataatgtcgccggttgaatgccggacgaccaaaggagaaatccgctcgtggaggggcttgcgtccgattagctagttggtggggtaaaggcctaccaaggcgatgatcggtagctggtctgagaggacgatcagccacacggggactgagacacggccccgactcctacgggaggcagcagcaaggaattttgcgcaatgggcgaaagcctgacgcagcaacgccgcgtgggggaagaatgccttcgggttgtaaactccttttctcagggaagatagtgacggtacctgaggaataagtctcggctaactacgtgccagcagccgcggtaat

SEQ ID NO: 9479 - DNA, 490 bp, unidentified
  misc_feature 1..490: note = Ascusbbf_396318, encodes 16S rRNA
  source 1..490: mol_type = genomic DNA
agagtttgatcctggctcagattgaacgctggcggcatgctttacacatgcaagtcgaacggcagcggggaggagcttgcttctctgccggcgagtggcgaacgggtgagtaatacatcggaacgtgtcgagaagagggggataaccacccgaaagggtggctaataccgcataaattctgaggaagaaagctggggacctgggaataggcctagcgctttttgagcggccgatgtcggattagctagttggtgaggtaaaggctcaccaaggcgaagatctgtagcgggtctgagaggatgatccgccacactgggactgagacacggcccagactcctacgggaggcagcagtggggaattttggacaatgggggcaaccctgatccagccatgccgcgtgtatgaagaaggccttagggttgtaaagtacttttgttagggaagaaaagtcagctgtgaataatggctgatactgacggtacctaaa

SEQ ID NO: 9480 - DNA, 483 bp, unidentified
  misc_feature 1..483: note = Ascusbbf_306974, encodes 16S rRNA
  source 1..483: mol_type = genomic DNA
agagtttgatcctggctcagaacgaacgttggcggcgtggattaggcatgcaagtcgcgggaatgcccagcaatgggtggaaccggcgtaaggggcagtaaggcatgggtacctacctggaggttgggcatagcccgtagaaatacggggtaattcccagcgatgtcgaaagaccaaagctccggcgcctcttgaggggcccatgtgatattagctagttggtgaggtaacggctcaccaaggcgaagatgtctagcgggtgtgagagcacgacccgcgccactggcactgagacactggccagacacctacgggtggctgcagtcgagaatcttcggcaatgggcgcaagcctgaccgagcgacgccgcgtgtgcgatgaaggccttcgggttgtaaagcactgtcgagagggagaaaggcgaaagcttgatctatctctggaggaagcacgggctaagttcgtgccagcagccgcggtaat

SEQ ID NO: 9481 - DNA, 490 bp, unidentified
  misc_feature 1..490: note = Ascusbbf_422699, encodes 16S rRNA
  source 1..490: mol_type = genomic DNA
agagtttgatcctggctcaggacgaacgctggcggcgcgcctaacacatgcaagtcgaacggagtttgtttgaaagatcccttcggggtgactttggataaacttagtggcgaacgggtgagtaacacgtgaggaacctgcccttcagagggggacaacagttggaaacgactgctaataccgcataagaccacagagccgcatggctcaggggtcaaaggagaaatccgctgaaggatggcctcgcgtccgattagctggatggcggggtaacggcccaccatggcgacgatcggtagccggactgagaggttgaacggccacattgggactgagacacggcccagactcctacgggaggcagcagtggggaatattgcacaatgggggaaaccctgatgcagcgacgccgcgtgagggaagaagattttcggattgtaaacctctgtcttcagggacgataatgacggtacctgaggaggaagccacg

SEQ ID NO: 9482 - DNA, 490 bp, unidentified
  misc_feature 1..490: note = Ascusbbf_1878775, encodes 16S rRNA
  source 1..490: mol_type = genomic DNA
agagtttgatcatggctcaggacgaacgctagcggcgcgcttaacacacgcaagtcgagcggaaaggcccttcggggtactcgagcggcgaacgggtgagtaacacgtgagcaacctgcccttggctttgggataaccccgggaaaccggggctaataccgaatacccacgcaccgtcgcatgacggtgcgtgaaaagttcttcggttgaggatgggctcgcggcctatcagcttgttggtggggtaacggcctaccaaggcttcgacgggtagccggcctgagagggcgaccggccacactgggactgagatacggcccagactcctacgggaggcagcagtgggaatattgcacaatgggcgcaagcctgatgcagcgacgccgcgtgagggacgaaggccttcgggttgtaaacctctttcggcagggacgaagcgaaagtgacggtacctgaagaagaagcgccggccaactacgtgccagcagcc

SEQ ID NO: 9483 - DNA, 490 bp, unidentified
  misc_feature 1..490: note = Ascusbbf_405735, encodes 16S rRNA
  source 1..490: mol_type = genomic DNA
agagtttgatcatggctcagattgaacgctggcggcaggcctaacacatgcaagtcgagcgcgaaaattccttcggggatgagtagagcggcggacgggtgagtaatgcgcagaaatctgcccagtagtgggggacaacctggtgaaaaccaggctaataccgcatacgccctacgggggaaagcaggggatcttcggaccttgcgctattggatgagtctgcgtcggattagcttgttggtgaggtaatggctcaccaaggcgacgatccgtagctggtctgagaggatgatcagccacactgggactgagacacggcccagactcctacgggaggcagcagtggggaatattggacaatgggcgaaagcctgatccagccatgccgcgtgtgtgaagaaggctctagggttgtaaagcactttcagtggggaagaaagcttgttagcgaataactgacgagtgtgacattacccacagaagaagcacc

SEQ ID NO: 9484 - DNA, 490 bp, unidentified
  misc_feature 1..490: note = Ascusbbf_418703, encodes 16S rRNA
  source 1..490: mol_type = genomic DNA
agagtttgatcatggctcaggacgaacgctggcggcgtgcctaacacatgcaagtcgaacgaagctccaatctttgagattcgtcaagaagagaggatgacttagtggcggacgggtgagtaacgcgtgagcaacctgcctttcagtgggggacaacagagggaaacttctgctaataccgcataatgtgccggggggacatcctcctggtaccaaagatttatcgctgaaagatgggctcgcgtctgattagatagttggtggggtaacggcccaccaagtcgacgatcagtagccgggttgagagactgaccggccacattgggactgagatacggcccagactcctacgggaggcagcagtggggaatattgggcaatgggggaaaccctgacccagcaacgccgcgtgaaggaagaaggccctcgggttgtaaacttcttttaccagggacgaagaaagtgacggtacctggagaaaaagctccgg

SEQ ID NO: 9485 - DNA, 490 bp, unidentified
  misc_feature 1..490: note = Ascusbbf_930558, encodes 16S rRNA
  source 1..490: mol_type = genomic DNA
agagtttgatcatggctcagattgaacgctggcggcatgcttaacacatgcaagtcgaacggcagcacagcagagcttgctctgtgggtggcgagtggcggacgggtgagtaatgcatcgggacctacccagacgtgggggataatgtagggaaacttacgctaataccgcatacgtcctacgggagaaagcgggggatcttcggacctcgcgcggttggatggaccgatgtgcgattagctagttggtgaggtaacggctcaccaaggcgacgatcgctagctggtctgagaggatgatcagccacactgggactgagacacggcccagactcctacgggaggcagcagtggggaatattggacaatgggcgcaagcctgatccagcaatgccgcgtgtgtgaagaaggccttcgggttgtaaagcacttttatcaggagcgaaatctgcaaggttaatacctttgcagtctgacggtacctgaggaat

SEQ ID NO: 9486 - DNA, 490 bp, unidentified
  misc_feature 1..490: note = Ascusbbf_1787362, encodes 16S rRNA
  source 1..490: mol_type = genomic DNA
agagtttgatcatggctcaggataaacgctagcggcaggcctaacacatgcaagtcgagcggcagcgcggagtggcaacactttggcggcgagcggcggacgggtgagtaacgcatatgcaacctgcccaccacacggagatagccgaccgaaaggacgattaaactccgatggcatcatacccccgcatggaggtttgattaaatatttataggtggtggatgggcatgcgtggcattagttagttggcggggcaacggcccaccaagacgattatgcctatgggttctaaaaggaagatcccacacatcggtactgagacacggaccgaactcctacgggaggcagcagtgaggaatattggacaatgggggcaaccctgatccagccgaaccgcgtggtggaaggaggtcgttaagatcgtaaacaccttttatatgggaataatacacatcacgagtggtgtgttgaatgtaccatttgaataagc

SEQ ID NO: 9487 - DNA, 490 bp, unidentified
  misc_feature 1..490: note = Ascusbbf_819591, encodes 16S rRNA
  source 1..490: mol_type = genomic DNA
agagtttgatcctggctcaggacgaacgctagcggcgtgcctaatacatgcaagtcgagcgaagtttttctggtgcttgcactagaaaaacttagcggcgaacgggtgagtaacacgtaaagaacctgcctcatagactgggacaactattggaaacgatagctaataccggataacagcattaactgcatggttgatgtttgaaagttggttttgctaacactatgagatggctttgcggtgcattagctagttggtggggtaaaggcctaccaaggcgacgatgcatagccgacctgagagggtgatcggccacactgggactgagacacggcccagactcctacgggaggcagcagtagggaatcttccgcaatgggcgaaagcctgacggagcaacgccgcgtgagcgaagaaggatttcggttcgtaaagctctgttgttagggaggaatgattatgtagtaactatacatagtagagacggtac

SEQ ID NO: 9488 - DNA, 490 bp, unidentified
  misc_feature 1..490: note = Ascusbbf_269135, encodes 16S rRNA
  source 1..490: mol_type = genomic DNA
agagtttgatcctggctcaggatgaacgctggcggcgtgcctaacacatgcaagtcgaacggttaaaaccacttcggtggcgtatagagtggcgaacgggtgagtaacacgtgaccaacctgccccccgcaccgggacaacgggtggaaacgcctgctaataccggatactccggggacggcgcatgccggccccgggaaagctccggcggcgggggatggggtcgcggcccatcagctagacggcggggtgacggcccaccgtggcgactacgggtagccgggttgagagaccgaccggccacattgggactgagacacggcccagactcctacgggaggcagcagtggggaatattgcgcaatgggggcaaccctgacgcagcaacgccgcgtgcgggacgaaggccttcgggtcgtaaaccgctttcatcggggaagacatcgactgtacccgaggaagaagccccggctaaatacgtgccagcagc

SEQ ID NO: 9489 - DNA, 248 bp, unidentified
  misc_feature 1..248: note = Ascusbbf_321173, encodes 16S rRNA
  source 1..248: mol_type = genomic DNA
agagtttgatcctggctcaggatgaacgctagctacaggcttaacacatgcaagtcgaggggtaacgatattgaaagcttgctttcgataggcgacgaccggcgcacgggtgagtaacgcgtatccaacctgcccataactaagggataatccgtagaaatgcggtctaataccttatgtgttccgaagaagacgacggtacctgactaagaagccccggctaactacgtgccagcagccgcggtaat

SEQ ID NO: 9490 - DNA, 490 bp, unidentified
  misc_feature 1..490: note = Ascusbbf_1076004, encodes 16S rRNA
  source 1..490: mol_type = genomic DNA
agagtttgatcctggctcaggatgaacgctagcggcaggcctaatacatgcaagtcgaacgggatccagttgttagcttgctaacaactggtgagagtggcgcacgggtgcgtaacgcgtgagcaacctacccatatcagggggatagcccgaagaaattcggattaacaccgcataagactacgagatggcatcatcaagtagttaaatatttataggatgtggatgggctcgcgtgacattagctagttggtgaggtaacggctcaccaaggcgacgatgtctaggggctctgagaggggaatcccccacactggtactgagacacggaccagactcctacgggaggcagcagtaaggaatattggtcaatggacggaagtctgaaccagccatgccgcgtgcaggatgactgccctatgggttgtaaactgcttttgtcgaggaataaacctatctacgtgtagatagctgaatgtacccgaagaat

SEQ ID NO: 9491 - DNA, 490 bp, unidentified
  misc_feature 1..490: note = Ascusbbf_890538, encodes 16S rRNA
  source 1..490: mol_type = genomic DNA
agagtttgatcatggctcaggacgaacgctggcggcgtgcctaacacatgcaagtcgagcgagaatttacgaaatgatttcttcggaatgaattttgtaaaggaaagcggcggacgggtgagtaacgcgtgagtaacctgcccataagagtgggataatccatggaaacgtggactaataccgcatattgagataatctcgcatggggatatcttgaaagatttatcgcttatggatggactcgcgtcagattagatagttggtgaggtaacggcccaccaagtcgacgatctgtagccgaactgagaggttgatcggccacattgggactgagacacggcccagactcctacgggaggcagcagtggggaatattgcgcaatgggggcaaccctgacgcagcaacgccgcgtgaaggaagaaggccttcgggttgtaaacttctgtctttagggaagaaacaaatgacggtacctaaggaggaagccac

SEQ ID NO: 9492 - DNA, 473 bp, unidentified
  misc_feature 1..473: note = Ascusbbf_1767099, encodes 16S rRNA
  source 1..473: mol_type = genomic DNA
agagtttgatcatggctcagagcgaacgctggcggcaggcttaacacatgcaagtcgagcgggcatccttgtggtgtcagcggcagacgggtgagtaacgcgtgggaacgtgcccttcggttcggaataactcagggaaacttgagctaataccggatacgcccttttggggaaaggtttactgccgaaggatcggcccgcgtctgattagctagttggtgaggttatggctcaccaaggcgacgatcagtagctggtctgagaggatgatcagccacactgggactgagacacggctcagactcctacgggaggcagcagtggggaatattggacaatgggggcaaccctgatccagccatgccgcgtgagtgatgacggccttagggttgtaaagctcttttctccgggacgataatgacggtaccggaggaataagccccggctaacttcgtgccagcagccgcggtaat

SEQ ID NO: 9493 - DNA, 490 bp, unidentified
  misc_feature 1..490: note = Ascusbbf_1115337, encodes 16S rRNA
  source 1..490: mol_type = genomic DNA
agagtttgatcatggctcaggatgaacgctggcggcgtgcttaacacatgcaagtcgaacgaagctccggaagcagaggtttcggccaaagcggaaggaagacttagtggcggacgggtgagtaacgcgtgggtaacctgccatatacagggggataacagttagaaatgactgctaataccgcataagcgcacggtaaggcatcttacagtgtgaaaagctcagacggtatatgatggacccgcgtctgattagctagttggaagggtaacggcctaccaaggcgacgatcagtagccggcctgagagggtgaacggccacattgggactgagacacggcccaaactcctacgggaggcagcagtggggaatattgcacaatgggggaaaccctgatgcagcgacgccgcgtgagtgaagaagtacttcggtacgtaaagctctatcagcagggaagaaaatgacggtacctgactaagaagccccggc

SEQ ID NO: 9494 - DNA, 490 bp, unidentified
  misc_feature 1..490: note = Ascusbbf_715867, encodes 16S rRNA
  source 1..490: mol_type = genomic DNA
agagtttgatcatggctcaggacgaacgctggcggcgtgcctaatacatgcaagtcgagcgagtctcttcggaggctagcggcggacgggtgagtaacacgtaggcaacctgcccgtaagactgggataacatagggaaacttatgctaataccagatagagtctactctcgcatgagggaagacggaaaggtggcgcaagctatcacttacggatgggcctgcggcgcattagctagttggtggggtaatggcctaccaaggcgacgatgcgtagccgacctgagagggtgaccggccacactgggactgagacacggcccagactcctacgggaggcagcagtagggaattttccacaatggacgaaagtctgatggagcaacgccgcgtgaacgatgaaggtcttcggattgtaaagttctgttgttagggacgaacaagtaccgttcgaacagggcggtaccttgacggtacctgacgagaaagcc

SEQ ID NO: 9495 - DNA, 490 bp, unidentified
  misc_feature 1..490: note = Ascusbbf_372703, encodes 16S rRNA
  source 1..490: mol_type = genomic DNA
agagtttgatcatggctcaggatgaacgctggcggcgtgcttaacacatgcaagtcgaacggagaacctcagatcgagttttcggacaagagatgggaattcttagtggcggacgggtgagtaacgcgtgaggaacctgccttggagaggggaataacacagagaaatttgtgctaataccgcatgatgcaactaagtcgcatggctttggttgccaaagatttatcgctctgagatggcctcgcgtctgattagcttgttggcggggtaacggcccatcaaggcgacgatcagtagccggactgagaggttggccggccacattgggactgagacacggcccagactcctacgggaggcagcagtggggaatattgggcaatgggcgcaagcctgacccagcaacgccgcgtgaaggaagaaggctttcgggttgtaaacttcttttgtctgggacgaaagcaatgacggtaccagacgaataagctcc

SEQ ID NO: 9496 - DNA, 241 bp, unidentified
  misc_feature 1..241: note = Ascusbbf_632733, encodes 16S rRNA
  source 1..241: mol_type = genomic DNA
agagtttgatcctggctcaggatgaacgctagctacaggcttaacacatgcaagtcgaggaggcagcagtgaggaatattggtcaatggacgagagtctgaaccagccaagtagcgtgcaggatgactgccctatgggttgtaaactgcttttatgcgggaataaagtcaggtacgcgtacctgtttgtatgtaccgcatgaataaggaccggctaattccgtgccagcagccgcggtaat

SEQ ID NO: 9497 - DNA, 490 bp, unidentified
  misc_feature 1..490: note = Ascusbbf_417327, encodes 16S rRNA
  source 1..490: mol_type = genomic DNA
agagtttgatcatggctcaggacgaacgctggcggcgtgcttaacacatgcaagtcgaacggaaaggcccgcttgcgggtactcgagtggcgaacgggtgagtaacacgtgggcaacctgccctcagctctgggataactccgggaaaccggtgctaatactggatatcgacttctgcctcgcatggggtgttgttgaaagtttttcggctggggatgggcccgcggcctatcagcttgttggtggggtgatggcctaccaaggcgacgacgggtagccggcctgagagggcgaccggccacactgggactgagacacggcccagactcctacgggaggcagcagtggggaatattgcgcaatgggcggaagcctgacgcagcgacgccgcgtgagggatgacggccttcgggttgtaaacctctttcagctctgacgaagcgagagtgacggtaggagcagaagaagcaccggccaactacgtgccagc

SEQ ID NO: 9498 - DNA, 490 bp, unidentified
  misc_feature 1..490: note = Ascusbbf_1692421, encodes 16S rRNA
  source 1..490: mol_type = genomic DNA
agagtttgatcatggctcagattgaacgctggcggcaggcctaacacatgcaagtcgagcggtaacaggagagcttgctctcgctgacgagcggcggacgggtgagtaatgcgcaggaatctacccagtagcgggggatagcccggggaaactcggattaataccgcatacgccctacgggggaaagcaggggatcttcggaccttgcactattggaagagcctgcgttggattagctagttggtagggtaaaggcctaccaaggcgacgatccataactggtctgagaggatgatcagtcaaaccggaactgagacacggtccggactcctacgggaggcagcagtggggaatattggacaatgggggcaaccctgatccagccatgccgcgtgtgtgaagaaggccttcgggttgtaaagcactttaagttgggaggaaggggtgactactaatattagtcatcattgacgttaccaacagaataagc

SEQ ID NO: 9499 - DNA, 487 bp, unidentified
  misc_feature 1..487: note = Ascusbbf_366027, encodes 16S rRNA
  source 1..487: mol_type = genomic DNA
agagtttgatcctggctcaggatgaacgctggcggcgtgcctaacacatgcaagtcgagcgatctcttcggagagagcggcggacgggtgagtaacgcgtgggtaacctgccctgtacacacggataacataccgaaaggtatactaatacgggataacatacgaaagtcgcatggcttttgtatcaaagctccggcggtacaggatggacccgcgtctgattagctagttggtaaggtaatggcttaccaaggcaacgatcagtagccgacctgagagggtgatcggccacactggaactgagacacggtccagactcctacgggaggcagcagtggggaatattgcacaatgggcgaaagcctgatgcagcaacgccgcgtgagcgatgaaggccttcgggtcgtaaagctctgtcctcaaggaagataatgacggtacttgaggaggaagccccggctaactacgtgccagcagccgcggtaat

SEQ ID NO: 9500 - DNA, 490 bp, unidentified
  misc_feature 1..490: note = Ascusbbf_488529, encodes 16S rRNA
  source 1..490: mol_type = genomic DNA
agagtttgatcctggctcaggacaaacgctggcggcgtgcctaatacatgcaagtctaacgagaaacaggagcttgctcctgtggaaagtggcggacgggtgagtaatatgtaggaaatctgcccttaggtgggggacaacagttggaaacgactgctaataccgcatatgtgcttggttgaaataccaatcatgaaagatttattgcctgaggatgagcctgcatctgattagcttgttggtggtgtaaaggactaccaaggcgacgatcagtagctggtttgagaggatgatcagccaaaatgggactgagacacggcccatactcctacgggaggcagcagtagggaattttgcgcaatgggcgaaagcctgacgcagcaacgccgcgtgagcgatgaagcccctcggggtgtaaagctctgtcagtagggatgaattttgaccgtacctacagaggaagcatcggctaactacgtgccagcagccg

SEQ ID NO: 9501 - DNA, 490 bp, unidentified
  misc_feature 1..490: note = Ascusbbf_477276, encodes 16S rRNA
  source 1..490: mol_type = genomic DNA
agagtttgatcctggctcaggacgaacgctggcggcacgcttaacacatgcaagtcgaacgaacgaagaggagcttgctcctcctagttagtggcggacgggtgagtaacacgtgagcaacctgccttcaagtgaggaataatggttggaaacgaccactaatacctcataatgcagcggtatcgcatggtactgctgccaaagcctagtgtgcttgaagatgggctcgcgtccgattagttagatggtgaggtaacggctcaccatgaccgcgatcggtagccgtactgagaggtagaacggccacattgggactgagacacggcccagactcctacgggaggcagcagtggggaatattgcacaatggaggaaactctgatgcagcgatgccgcgtgagggaagaaggctctcgggttgtaaacctctgttcttggggacgataatgacggtacccaaggagaaagctccggctaactacgtgccagc

SEQ ID NO: 9502 - DNA, 490 bp, unidentified
  misc_feature 1..490: note = Ascusbbf_1520504, encodes 16S rRNA
  source 1..490: mol_type = genomic DNA
agagtttgatcatggctcaggatgaacgctagcggcaggcctaatacatgcaagtcgaacggtaaatgtcccttcggggatatgagagtggcgcacgggtgcgtaacgcgtatgcaacccacccgctgtcgggggatagcccgtagaaatgcgaattaataccccatgaggagaaagggcggcatcgtccttttttcaaaactttggtgacggcggacgggcatgcgtgccattagatagttggtgaggtaacggcccaccaagtcgacgatggctaggggttctgagaggaaggtcccccacattggaactgagacacggtccagactcctacgggaggcagcagtgaggaatattggacaatggccgagaggctgatccagccatgccgcgtgcgggatgaaggccctatgggtcgtaaaccgcttttgtcggggagcaataagggttacgtgtagcccgatgagagtacctggcgaataagcatcgg

SEQ ID NO: 9503 - DNA, 490 bp, unidentified
  misc_feature 1..490: note = Ascusbbf_654410, encodes 16S rRNA
  source 1..490: mol_type = genomic DNA
agagtttgatcctggctcaggatgaacgctggcggcgtgcttaacacatgcaagtcgagcggtaaggccctttcgggggtacacgagcggcgaacgggtgagtaacacgtgagtaatctgccctgcgcttcgggataaccatcggaaacggtggctaataccggatatgacgccctgctgcatggtagggtgtggaaagttttttcggcgcaggatgtgctcgcggcctatcagcttgttggtgaggtaatggctcaccaaggcttcgacgggtagccggcctgagagggtgaccggccacactgggactgagacacggcccagactcctacgggaggcagcagtggggaatattggacaatgggcggaagcctgatccagcaacgccgcgtgagggatgactgccttcgggttgtaaacctctttcagtaccgacgaagcgagagtgacggtaggtacagaagaagcaccggccaactacgtgccagca

SEQ ID NO: 9504 - DNA, 473 bp, unidentified
  misc_feature 1..473: note = Ascusbbf_1821740, encodes 16S rRNA
  source 1..473: mol_type = genomic DNA
agagtttgatcatggctcagaacgaacgctggcggcaggcctaaaacatgcaagttgaacgggcgtagcaatacgtttagtagcggacgggtgaggaacatatgggaacgtaccctttggtgggggataacttctggaaacgggaggtaataccgcataagccatgagtgggaaatatttatagccgaaggagcggcccatattggattagctagttggttaggtaaaggctgaccaaggcgacgatccatagccggtttgagaggatgatcggccacactgggactgagacacggcccagactcctacgggaggcagcagttaagaatattggacaatgggggaaaccttgatccagccatgccgcgtgagtgaagaaggccttcgggttgtaaagctcttttgtatgggaaaatgatgatggtaccataagaataagcaccggcaaacttcgtgccagcagccgcggtaat

SEQ ID NO: 9505 - DNA, 490 bp, unidentified
  misc_feature 1..490: note = Ascusbbf_762164, encodes 16S rRNA
  source 1..490: mol_type = genomic DNA
agagtttgatcctggctcaggacgaacgctggcggcacgcttaacacatgcaagtcgaacggtgaagtaacttcggttatgggacagtggcggacgggtgagtaacacgtgagcaatctgcctttaagtggggaataacatttggaaacggatggtaataccgcataatatagacatatcgcatgataagtctatcaaagatttatcgcttaaagatgagctcgcgtctgattagatagttggtgaggtaacggctcaccaagtcaacgatcagtagccggactgagaggttgaacggccacattgggactgagacacggcccagactcctacgggaggcagcagtggggaatattgcacaatggaggaaactctgatgcagcgatgccgcgtgagggaagaaggttttcggattgtaaacctctgttgacagggacgataatgacggtacctgttcagaaagctccggctaactacgtgccagcagccg

SEQ ID NO: 9506 - DNA, 490 bp, unidentified
  misc_feature 1..490: note = Ascusbbf_1574432, encodes 16S rRNA
  source 1..490: mol_type = genomic DNA
agagtttgatcatggctcaggatgaacgctagcggcaggcctaatacatgcaagtcgaacggtatccccctttcgggggggagagagtggcggatgggtgcgtaacgcgtatgcaacctgcccccttcaggggaatagctcccggaaacgggaatcaataccccatgttcccatatgccggcatcggtttatgggcaaagccttcgggcggtaggggatgggcatgcgtaggattagcttgttggcggtgtaacggaccaccaaggcgacgatccttaggggttctgagaggaaggtcccccacactggcactgagacacgggccagactcctacgggaggcagcagtagggaatattgggcaatgggcggcagcctgacccagccatgccgcgtgcaggaagacggcgttctgcgttgtaaactgcttttacacgggaagaaaaggcccatgcgtgggacattgccggtaccgtgtgaataagcaccgg

SEQ ID NO: 9507 - DNA, 470 bp, unidentified
  misc_feature 1..470: note = Ascusbbf_957621, encodes 16S rRNA
  source 1..470: mol_type = genomic DNA
agagtttgatcctggctcagaacgaacgctggcggcatgcctaacacatgcaagtcgaacgagctcttcggagctagtggcggacgggtgagtaacgcgtgggaacctgcccaaaggtaagggataacttcgggaaaccggagctaataccatatacgcccttcgggggaaagatttatcgcctttggatgggcccgcgtcggattagctagttggtggggtaatggcctaccaaggcgacgatccgtagctggtctgagaggatgatcagccacactgggactgagacacggcccagactcctacgggaggcagcagtggggaatattggacaatgggggaaaccctgatccagcaatgccgcgtgtgtgtagaaggccctagggttgtaaagcactttcagcagggaagataatgacggtacctgcagaagaagccccggctaactccgtgccagcagccgcggtaat

SEQ ID NO: 9508 - DNA, 490 bp, unidentified
  misc_feature 1..490: note = Ascusbbf_1071510, encodes 16S rRNA
  source 1..490: mol_type = genomic DNA
agagtttgatcctggctcaggataaacgctggcggcgtgcctaatacatgcaagtcgatcggtagaagtccagcttgctggacggaaatagaggcgaacgggtgagtaatacgtaagcaacctgcccacgaagaccgggataatccctggaaacggggactaagaccggataggtacacagaccgcatggtctgtgtattaaaggagagagacactggtggatgggcttacggtgcattagctggatggtgaggtaaggcccaccatggcgatgatgcatagccgggctgagaggctgaacggccacattgggactgagacacggcccagactcctacgggaggcagcagtagggaattttcggcaatgggggcaaccctgaccgagcaacgccgcgtgagtgatgaaggtcttcggattgtaaagctctgttgtaagggaagaacggcatctagagaataggtgagtgacggtaccttaccagaaagct

SEQ ID NO: 9509 - DNA, 490 bp, unidentified
  misc_feature 1..490: note = Ascusbbf_988679, encodes 16S rRNA
  source 1..490: mol_type = genomic DNA
agagtttgatcctggctcaggacgaacgctggcggcacgcttaacacatgcaagtcgaacggacgagaaggagcttgcttcttcaagttagtggcggacgggtgagtaacacgtgagcaacctgcctttaagttcgggatagcttctggaaacggatggtaataccggataacatacctgcatcgcatggtgaaggtatcaaagatttattgcttagagatgggctcgcgtctgattagatagttggtgaggtaacggctcaccaagtcgacgatcagtagccggactgagaggttgaacggccacattgggactgagacacggcacagactcctacgggaggcagcagtggggaatattgcacaatgggggaaaccctgatgcagcgatgccgcgtggaggaagaaggttttcggattgtaaactccttttaacggggacgataatgacggtacccgcagaaaaagctccggctaactacgtgccagca

SEQ ID NO: 9510 - DNA, 490 bp, unidentified
  misc_feature 1..490: note = Ascusbbf_1832081, encodes 16S rRNA
  source 1..490: mol_type = genomic DNA
agagtttgatcctggctcaggatgaacgctggcggcgtgcttaacacatgcaagtcgaacggagcttataaagaaagcggagcttgctccaatggaagtatgagcttagtggcggacgggtgagtaacgcgtgggtaacctgccttacacagggggacaacagttagaaatgactgctaataccgcataagccggtaggatcgcatgatccatccggaaaagatttatcggtgtaagatgggcccgcgttggattagttagttggtggggtaagggcccaccaagaccgcgatccatagccgacctgagagggtgatcggccacattgggactgagacacggcccaaactcctacgggaggcagcagtggggaatattgcgcaatggggggaaccctgacgcagcaacgccgcgtgagtgaagaagtatttcggtatgtaaagctctatcagcagggaagaagatgacggtacctgcagaagaagtcccg

SEQ ID NO: 9511 - DNA, 490 bp, unidentified
  misc_feature 1..490: note = Ascusbbf_462184, encodes 16S rRNA
  source 1..490: mol_type = genomic DNA
agagtttgatcctggctcaggacgaacgctggcggcgtgcctaacacatgcaagtcgaacggacgaggggagcttgctccccgagttagtggcgaacgggtgagtaacgcgtgagtaacctgccttggagagggggacaacagccggaaacggctgctaataccgcataacgtcgttgggaggcatcttccgacgaccaaagatttatcgctctgagatggactcgcgtccgattagatagttggcggggcaacggcccaccaagtcgacgatcggtagccggactgagaggttgaacggccacattgggactgagatacggcccagactcctacgggaggcagcagtgaggaatattgggcaatgggcgaaagcctgacccagcaacgccgcgtgaaggaagaaggttttcggattgtaaacttcttttcttcgggacgaaaactgacggtaccgaaggaataagccacggctaactacgtgccagcag

SEQ ID NO: 9512 - DNA, 487 bp, unidentified
  misc_feature 1..487: note = Ascusbbf_477840, encodes 16S rRNA
  source 1..487: mol_type = genomic DNA
agagtttgatcatggctcaggacgaacgctggcggcgtgcctaacacatgcaagtcaagggactcttcggagtcactggcgaacgggtgagtaacgcgtggataatctgcccttatctccggaataacatcaagaaattggtgctaaaaacggatgaggcacattgtgtcaaaggaaacggataaggatgagtccgcgtctgattagcttgttggtgaggtaaaggctcaccaaggctgcgatcagtagctggtctgagaggacgatcagccacactggaactgagacacggtccagactcctacgggaggcagcagtgaggaattttgcacaatggaggaaactctgatgcagcgacgccgcgtgcgggatgaaagggctttgccttgtaaaccgctgtcggatgggaaaaaaagttccctcgggggactgggattgtaccatcaaaggaaggaccggctaactacgtgccagcagccgcggtaat

SEQ ID NO: 9513 - DNA, 468 bp, unidentified
  misc_feature 1..468: note = Ascusbbf_914679, encodes 16S rRNA
  source 1..468: mol_type = genomic DNA
agagtttgatcatggctcagaacgaacgctggcggcaggcttaacacatgcaagtcgaacgcatcgcaagatgagtggcagacgggtgagtaacgcgtgggaatctacccttttctacggaacaactgagggaaacttcagctaataccgtatacggcctttgggcgaaagatttatcggagaaggatgagcccgcgttggattagctagttggtggggtaaaggcctaccaaggcgacgatacatagctggtctgagaggatgatcagccacactgggactgagacacggcccagactcctacgggaggcagcagtggggaatattggacaatgggcgcaagcctgatccagccatgccgcgtgtgtgatgaaggtcttaggattgtaaagcactttcaccggagaagataatgacggtatccggagaagaagccccggctaacttcgtgccagcagccgcggtaat

SEQ ID NO: 9514 - DNA, 490 bp, unidentified
  misc_feature 1..490: note = Ascusbbf_720583, encodes 16S rRNA
  source 1..490: mol_type = genomic DNA
agagtttgatcatggctcaggacgaacgctggcggcgtgcctaacacatgcaagtcgagcggagcttaagaagtcagaagttttcggacggaagacattttaagcttagcggcggacgggtgagtaacgcgtgggcaatctgcccttcacagggggataacacagggaaacttgtgctaataccgcataagatcgtataacggcatcgttaagcgaccaaaggagcgatccggtgaaggaggagcccgcgtctgattagatagttggtgaggtaacggcccaccaagtcgacgatcagtagccgaactgagaggttgatcggccacattgggactgagacacggcccagactcctacgggaggcagcagtggggaatattgcacaatggaggaaactctgatgcagcaacgccgcgtgaaggaagaaggtcttcggattgtaaacttctttgatcggggacgaagaatgacggtacccgaaaaacaagcc

SEQ ID NO: 9515 - DNA, 490 bp, unidentified
  misc_feature 1..490: note = Ascusbbf_320556, encodes 16S rRNA
  source 1..490: mol_type = genomic DNA
agagtttgatcatggctcaggacaaacgctggcggcgtgcctaatacatgcaagtcgaacgagaatctgaagcttgcttcagaggaaagtggcggacgggtgagtaatatgtaggaaatctgcccttacgtgggggacaacagttggaaacgactgctaataccccataggagattagttgaaatactaatttttaaagatttatcgcgtaaggatgagcctgcatctgattagcttgttggtggtgtaatggactaccaaggcgacgatcagtagctggtttgagaggatgatcagccacaatgggactgagacacggcccatactcctacgggaggcagcagtagggaattttgcgcaatgggcgaaagcctgacgcagcaacgccgcgtgagtgatgaagcccctcggggtgtaaaactctgtcagtagggacaaattttgatggtacctacagaggaagcatcggctaactacgtgccagcagccg

SEQ ID NO: 9516 - DNA, 170 bp, unidentified
  misc_feature 1..170: note = Ascusbbf_174837, encodes 16S rRNA
  source 1..170: mol_type = genomic DNA
agagtttgatcctggctcagtaagaattgactagcccaagtgatcggacaactaagaatgtaggaatcatcccgccgctaaacaacattgagaatacaaccataaaattgacgaatcctctaccaaataaatatcttcttgataaaccataagccagcagccgcggtaat

SEQ ID NO: 9517 - DNA, 253 bp, unidentified
  misc_feature 1..253: note = Ascusbbf_481933, encodes 16S rRNA
  source 1..253: mol_type = genomic DNA
agagtttgatcctggctcagattgaacgctggcggcgtgcttaacacatgcaagtcgaacgaagaaggttagaatgagagcttcggcaggatttttatctatcttagtggcggacgggtgagtaacgtgtgggcaacctgccctgtactggggaataatcattggaaacgatgactaataccgcatgtggtcctcgggaggcatcttcttatgaataaggatcggctaactccgtgccagcagccgcggtaat

SEQ ID NO: 9518 - DNA, 490 bp, unidentified
  misc_feature 1..490: note = Ascusbbf_699778, encodes 16S rRNA
  source 1..490: mol_type = genomic DNA
agagtttgatcatggctcagattgaacgctggcggcaggcttaacacatgcaagtcgagcggtaacaggggagcttgctcctgctgacgagcggcgaacgggtgagtaacgcgtaggaatctacctggtagtgggggataacccggggaaactcgggctaataccgcatacgctccacggaggaaagcgggggatcttcggacctcgcgctatcagatgagcctgcgtaggattagctagttggtggggtaaaggctcaccaaggcgacgatccttagctggtctgagaggatggccagtcacaccggaactgagacacggtccggactcctacgggaggcagcagtggggaatcttggacaatgggggcaaccctgatccagccatgccgcgtgggtgaagaaggccttcgggttgtaaagcccttttgttggggaggaaaggttgccggcgaatacctggtgactgtgacgttacccaaagaataagc

SEQ ID NO: 9519 - DNA, 490 bp, unidentified
  misc_feature 1..490: note = Ascusbbf_997610, encodes 16S rRNA
  source 1..490: mol_type = genomic DNA
agagtttgatcatggctcaggatgaacgctggcggcgtgcttaacacatgcaagtcgaacggacgccgtctggaagcggagtgagcttgctcatgaaacggaaggatgatgttagtggcggacgggtgagtaacgcgtgggtaacctgcctcacattgggggataccagtcggaaacgactgctaaaaccgcataagaccacgaaaccgcatggtatcgcggccaaaactccggtgatgtgagatggacccgcgtctgattagccagttggcggggtaacggcccaccaaagcgacgatcagtagccgacctgagagggtgatcggccacattgggactgagacacggcccaaactcctacgggaggcagcagtggggaatattgcacaatgggggaaaccctgatgcagcgacgccgcgtgagtgatgaagtatttcggtacgtaaagctctatcagcaggaacgataatgacggtacctgactaagaa

SEQ ID NO: 9520 - DNA, 490 bp, unidentified
  misc_feature 1..490: note = Ascusbbf_1735951, encodes 16S rRNA
  source 1..490: mol_type = genomic DNA
agagtttgatcatggctcaggatgaacgctggcggcgtgcctaatacatgcaagtcgaacgaggccctctgtacttgtatagaggtgtcctagtggcgaacgggtgagtaacgcgttggtgacctgccccgaagtgggggataacagttcgaaaggactgctaataccccatgtgactgtgagagttagaggtctcactatcaaaggagtaatccgcttcgggaggggcctgcgtcccatcagctagttggtaaggtaatggcttaccaaggcttagacgggtaggggacctgagagggtgaccccccacactggaactgaaacacggtccagacacctacgggtggcagcagtagggaatattgcacaatgggcgaaagcctgatgcagcaacgccgcgtgcacgatgaaggccttcgggttgcaaagtgcttttatgagggaagggaaaggactgtacctcatgaataaggatcggctaactacgtgc

SEQ ID NO: 9521 - DNA, 490 bp, unidentified
  misc_feature 1..490: note = Ascusbbf_1858718, encodes 16S rRNA
  source 1..490: mol_type = genomic DNA
agagtttgatcatggctcagaacgaacgctggcggcaggcttaacacatgcaagtcgagcgccccgcaaggggagcggcagacgggtgagtaacgcgtgggaatctacccatctctacggaataactcagggaaacttgtgctaataccgtatacgcccttcgggggaaagatttatcggagatggatgagcccgcgttggattagctagttggtgaggtaaaggctcaccaaggcgacgatccatagctggtctgagaggatgatcagccacactgggactgagacacggcccagactcctacgggaggcagcagtggggaatattggacaatggggggaaccctgatccagccatgccgcgtgtgtgaagaaggccttatggttgtaaagcactttaagcgaggaggaggctactttagttaatacctagggatagtggacgttactcgcagaataagcaccggctaactctgtgccagcagccgcgg

SEQ ID NO: 9522 - DNA, 490 bp, unidentified
  misc_feature 1..490: note = Ascusbbf_787897, encodes 16S rRNA
  source 1..490: mol_type = genomic DNA
agagtttgatcatggctcagattgaacgctggcggcaggcctaatacatgcaagtcgaacggtaacataagaaaagcttgcttttcttgatgacgagtggcggacgggtgagtaacatttgggaaactacctgatagagggggacaacagttggaaacgactgctaataccgcatacagcctaagggtgaaagaagcaattcgctatcagatgtgcccaaacgggattagctagttggtgaggtaacggcccaccaaggcgatgatacatagccggtctgagaggatgaacggccacattgggactgagacacggcccagactcctacgggaggcagcagtaaggaattttcggcaatggacgaaagtctgaccgagcaacgccgcgtgagtgatgaaggcctttgggttgtaaagctctgtggtagaggaagaacaccatggataggaaatgctccatggctgacggtactcttctagaaagtcacggc

SEQ ID NO: 9523 - DNA, 490 bp, unidentified
  misc_feature 1..490: note = Ascusbbf_1610597, encodes 16S rRNA
  source 1..490: mol_type = genomic DNA
agagtttgatcctggctcaggatgaacgctggcggcgtgcctaatacatgcaagtcgaacggaagcacttcggtgctttagtggcgaacgggtgagtaacacgtaggtaacctgcccataagacgcggataacagttggaaacgactgctaatacacgataggtaacttgagcgcatgtttaagttattaaaggtccgaatggactacttatggaggggcctgcggcgcattagttagttggtggggtaagagcttaccaagacgatgatgcgtagccggactgagaggttgaacggccacattgggactgagacacggcccaaactcctacgggaggcagcagtagggaattttcggcaatggggggaaccctgaccgagcaacgccgcgtgaatgacgaagcacttcggtgcgtaaaattcttttattagggaagaatgacagatggaggaaatgccatgtgtgtgacggtacctaatgaataagccc

SEQ ID NO: 9524 - DNA, 490 bp, unidentified
  misc_feature 1..490: note = Ascusbbf_1817560, encodes 16S rRNA
  source 1..490: mol_type = genomic DNA
agagtttgatcatggctcaggatgaacgctagcggcaggcttaacacatgcaagtcgaggggtataagtagcttgctacttagagaccggcaaacgggtgcggaacacgtacgcaatctgcccttatctcagggatagcccagagaaatttggattaatacctgatagtattattggaaggcatcttttagtaattaaagatttattggataaggatgagcgtgcgtaagattagatagttggtagggtaacggcctaccaagtctacgatctttagctgatgtgagagcatgatcagccacacgggcactgagacacgggcccgactcctacgggaggcagcagtgaggaatattggtcaatggacggaagtctgaaccagccatgccgcgtgaaggatgaaggcgttctgcgttgtagacttcttttatgtaggaagaaaccactcttatctaagagtgttgacggtactatatgaataagcaccggc

SEQ ID NO: 9525 - DNA, 490 bp, unidentified
  misc_feature 1..490: note = Ascusbbf_1293027, encodes 16S rRNA
  source 1..490: mol_type = genomic DNA
agagtttgatcctggctcagattgaacgctggcggcaggcctaacacatgcaagtcgaacggtaacaggaagcagcttgctgtttcgctgacgagtggcggacgggtgagtaatgtctgggaaactgcctgatggagggggataactactggaaacggtagctaataccgcataagcgcacagcttcgcatgaagcggtgtgaaaaactccggtggtatgggatggacccgcgtctgattaggtagttggtggggtaacggcctaccaagccaacgatcagtagccggcctgagagggtggacggccacattgggactgagacacggcccaaactcctacgggaggcagcagtggggaatattgcacaatgggggaaaccctgatgcagcgacgccgcgtgaaggaagaagtatttcggtatgtaaacttctatcagcagggaagaaaatgacggtacctgactaagaagccccggctaactacgtgcca

SEQ ID NO: 9526 - DNA, 490 bp, unidentified
  misc_feature 1..490: note = Ascusbbf_1540703, encodes 16S rRNA
  source 1..490: mol_type = genomic DNA
agagtttgatcatggctcaggatgaacgctggcggcgtgcctaatacatgcaagtcgaacgaagcacttcggtgcttagtggcgaacgggtgagtaacacgtaggtaacctgtccttaagctgaggataacgtttggaaacgaacgctaatactcaataggtaatagagaggcatctctctattattaaagatcctttaggggattacttaaggaggggcctgcgtcgcattagttagttggtggggtgatggcctaccaagacgatgatgcgtagccggactgagaggttgaacggccacactgggactgagacacggcccagactcctacgggaggcagcagtagggaattttcggcaatggggggaaccctgaccgagcaacgccgcgtgaatgaagaagctcctcggagcgtaaaattcttttattaaggaagaatactattaataggaaatgattagtaaatgacggtacttaatgaataaggcc

SEQ ID NO: 9527 - DNA, 467 bp, unidentified
  misc_feature 1..467: note = Ascusbbf_1687288, encodes 16S rRNA
  source 1..467: mol_type = genomic DNA
agagtttgatcatggctcagaacgaacgttggcggcgtggattaggcatgcaagtcgagtgggtttaggcccacggcgaaagggacagtaacacgtggatacttgccttggggttcgggataaccgcgggaaactgcggataataccgaataatgtctccggaccaaagatttatcaccccaagagaggtccgcgtcctattagctagttggcggggtaacggcccaccaaggcaacgatgggtagcgggtgtgagagcacgacccgcgtcactgggactgagatactgcccagacacctacgggtggctgcagtcgagaatcttcggcaatgggcgaaagcctgaccgagcgacgccgcgtgcgggatgaaggccctcgggttgtaaaccgctgtggagaaggagtaaacactgaacgatttctctagaaagcacaggctaagttcgtgccagcagccgcggtaat

SEQ ID NO: 9528 - DNA, 469 bp, unidentified
  misc_feature 1..469: note = Ascusbbf_1150905, encodes 16S rRNA
  source 1..469: mol_type = genomic DNA
agagtttgatcctggctcagaacgaacgctggcggtaggcctaacacatgcaagtcgagcgaagtcttcggacttagcggcggacgggtgagtaacgcgtgggaacatgcccagaggtacggaacaacagttggaaacggctgctaataccgtatacgccctacgggggaaagaatttcgcctttggattggcccgcgttggattagatagttggtggggtaacggcctaccaagtctacgatccatagctggtttgagaggatgatcagccacactgggactgagacacggcccagactcctacgggaggcagcagtggggaatcttagacaatgggcgaaagcctgatctagccataccgcgtgagcgatgaaggccttagggttgtaaagctctttcgccagggatgataatgacagtacctggtaaagaagtcccggctaactccgtgccagcagccgcggtaat

SEQ ID NO: 9529 - DNA, 490 bp, unidentified
  misc_feature 1..490: note = Ascusbbf_1196906, encodes 16S rRNA
  source 1..490: mol_type = genomic DNA
agagtttgatcctggctcaggacgaacgctggcggcgtgcttaacacatgcaagtcgaacggagtattagaaatgaagttttcggatggatttttagtacttagtggcggacgggtgagtaacgcgtgggtaacctgcctcacacagggggataacagttggaaacgactgttaataccgcataagaccacagtaccgcatggtacaggggtaaaaactccggtggtgtgagatggacccgcgtctgattagttagttggcggggtaacggcccaccaagacgacgatcagtagccgatctgagaggatgaccggccacattggtactgagacacggaccaaactcctacgggaggcagcagtgaggaatattggtcaatgggcgagagcctgaaccagccaagtagcgtgcaggacgactgccctatgggttgtaaactgcttttatcagggaataaagtgcggcacgtgtgccgttttgtatgtacct

SEQ ID NO: 9530 - DNA, 470 bp, unidentified
  misc_feature 1..470: note = Ascusbbf_582570, encodes 16S rRNA
  source 1..470: mol_type = genomic DNA
agagttgtcatggctcagaacgaacgctggcggcatgcctaacacatgcaagtcgaacgagatcttcggatctagtggcggacgggtgagtaacgcgtgggtatctgccctggagcgtggaataaccgctggaaacggcggctaataccgcatacgccctgagggggaaaggcttcggccactctgggaggaacccgcgtccgattagctagttggaggggtaacggcccaccaaggcgacgatcggtagctggtctgagaggatgatcagccacactgggactgagacacggcccagactcctacgggaggcagcagtggggaatattggacaatgggggaaaccctgatccagcaatgccgcgtgcgtgaagaaggccttagggttgtaaagcgctttcgcccgcgaagatgatgacggtagcgggagaagaagccccggctaactccgtgccagcagccgcggtaat

SEQ ID NO: 9531 - DNA, 467 bp, unidentified
  misc_feature 1..467: note = Ascusbbf_1604304, encodes 16S rRNA
  source 1..467: mol_type = genomic DNA
agagtttgatcatggctcagaacgaacgctggcggcaggcttaacacatgcaagtcgagcgcgtagcaatacgagcggcagacgggtgagtaacgcgggggatgtgcctggtgatacggaacaactcagggaaacttgagctaataccgtataagcccttcgggggaaagatttatcgccaccagatcaacccgcgttggattagctagttggtgaggtaacggctcaccaaggcgacgatccatagctggtctgagaggatgatcagccacactgggactgagacacggcccagactcctacgggaggcagcagtggggaatattggacaatgggcgcaagcctgatccagccatgccgcgtgagtgatgaaggccttagggttgtaaagctctttcactggggaagataatgacggtacccagagaagaagccccggctaacttcgtgccagcagccgcggtaat

SEQ ID NO: 9532 - DNA, 490 bp, unidentified
  misc_feature 1..490: note = Ascusbbf_1170186, encodes 16S rRNA
  source 1..490: mol_type = genomic DNA
agagtttgatcctggctcaggacgaacgctggcggcgtgcctaacacatgcaagtcgaacggagatatggggcttgctccatatcttagtggcggacgggtgagtaacgcgtgagtaacctgcctttcagagggggatagccattggaaacgatggataataccgcataacgtatcattgtcgcatggcagagataccaaaggagcaatccgctgaaagatggactcgcgtccgattagatagttggtgaggtaacggcccaccaagtcgacgatcggtagccggactgagaggttgaacggccacattgggactgagacacggcccagactcctacgggaggcagcaatgagggatattgcacaatgggcgaaagcctgatgcagcaacgccgcgtgagggatgacggttttcggattgtaaacctctgtcttcggtgaagataatgacattagccgaggaggaagccacggctaactacgtgccagca

SEQ ID NO: 9533 - DNA, 490 bp, unidentified
  misc_feature 1..490: note = Ascusbbf_1787936, encodes 16S rRNA
  source 1..490: mol_type = genomic DNA
agagtttgatcatggctcagaatgaacgttggcggcgtggattaggcatgcaagtcgaacggtaaggtcacttagcttgctttgtgaccctagagtggcgaaagggatagtatcatgtagatcatatacccgagggtaggggatagcgtctggaaacgggcggtaataccctataatatctccggatgaaaggtgagattccgccttcggattagtttacacactattagctagttggtgaggtaaaggcccaccaaggcgacgatggttaccgggcgtgagagcgtgacccggatcactgggactgagacactgcccagacacctacgggtggctgcagtcgagaatcttcggcaatggacgaaagtctgaccgagcgacgccgcgtgtatgatgaaggtcttcggattgtaaagtactgtcgattaggcggaaatatataggggcactcccttatatttgacctatcattggaggaaggacgggctaa

SEQ ID NO: 9534 - DNA, 490 bp, unidentified
  misc_feature 1..490: note = Ascusbbf_912241, encodes 16S rRNA
  source 1..490: mol_type = genomic DNA
agagtttgatcatggctcagagcgaacgctggcggcatgcttaacacatgcgagtcgcacgaaggtttcggccttagtggcggacgggtgagtaacgcgtaggtatctatccatgggtgggggataacactgggaaactggtgctaataccgcatgacacctgagggtcaaaggcgcaagtcgcctgtggaggagcctgcgtttgattagctagttggtggggtaaaggcctaccaaggcgatgatcaatagctggtttgagaggatgatcagccacactgggactgagacacggcccagactcctacgggaggcagcagtagggaatcttccgcaatggacgaaagtctgacggagcaacgccgcgtgagtgatgaaggttttcggatcgtaaagctctgttgccagggaagaacgtccgttagagtaactgctaacggagtgacggtacctgagaagaaagccccggctaactacgtgccagcagccg

SEQ ID NO: 9535 - DNA, 490 bp, unidentified
  misc_feature 1..490: note = Ascusbbf_1014459, encodes 16S rRNA
  source 1..490: mol_type = genomic DNA
agagtttgatcatggctcaggacgaacgctggcggcgtgcctaacacatgcaagtcgaacggacatactagcaatagtatgttagtggcggacgggtgagtaatacatgagtaacctgccttatacagggggataacacttagaaataggtgctaataccgcatgataacccttggtggcatcactaggggaggaaaggagaaatccagtaaaagatgggctcatgttcgattagctagttggtgaggtaatggctcaccaaggccacgatcgatagccgaactgagaggttgaacggccacattggaactgagagacggtccagactcctacgggaggcagcagtgggggatattgcgcaatgggggaaaccctgacgcagcaacgccgtgtgaaggaagaaggctttagggttgtaaacttctttgattagggacgaataaatgactgtacctaaggaacaagccacggctaactacgtgccagcagc

SEQ ID NO: 9536 - DNA, 490 bp, unidentified
  misc_feature 1..490: note = Ascusbbf_1504879, encodes 16S rRNA
  source 1..490: mol_type = genomic DNA
agagtttgatcatggctcagaatgaacgttggcggcgtggattaggcatgcaagtcgagcggcaaggttccttcgggagccctagagcggcggaagggataggaacatatagataacatgcctcctaggtcgggatagcgtcgggaaactggcgataataccggatgtggtcttcggactaaaggtgcgattcccttaggagattggtctatatcctattagctagttgggggggtaatggcccaccaaggcaatgatgggtacgtggcgtgagagcgcgaccacgatcactgggactgagacactgcccagacgcctacgggcggctgcagtcgagaatcttcggcaatggacgaaagtctgaccgagcgacgccgcgtgtatgaagaaggtcttcggattgtaaaatactgtcgatagggcggaaatttaggagcgcaatcgttcctatttgacctatcttttgaggaaggacgggctaagttcgtgc

SEQ ID NO: 9537 - DNA, 362 bp, unidentified
  misc_feature 1..362: note = Ascusbbf_1092654, encodes 16S rRNA
  source 1..362: mol_type = genomic DNA
agagtttgatcctggctcaggatgaacgctggcggcgcgtcttaagcatgcaagtcgagcggtaagatatagcttgctatatcctagagcggcggactggtgagtaacacgtgggtgacataccctccggaccgggatagctcctagaaataggagataatacctgatacgatttctgttgtcagaggacaggaaggaaaggtgcttcggcaccgccggaggagtggcccgcggcccattagctagttggtgaggtaacggcccaccaaggcgacgatgggtatccggcctaagagggtggacggacacattgggactgagatacggcccagactcctacgggagccagcagccgcggtaat

SEQ ID NO: 9538 - DNA, 490 bp, unidentified
  misc_feature 1..490: note = Ascusbbf_597729, encodes 16S rRNA
  source 1..490: mol_type = genomic DNA
agagtttgatcatggctcaggacgaacgctggcggcgtgcttaacacatgcaagtcgagcgaggcgcctcttacgagaggcagccgagcggcgaacggctgagtaacacgtgagcaactcaccctcggctccgggataacctcgggaaactgaggctaataccggatacgaccatgcacggcatcgtgcgtggtggaaaggtggccgcccgcgagggcggtctccggccgaggacaggctcgcggcctatcagctagtcggtgggataacggctcaccgaggcattgacgggtagccgacctgagagggtgaccggccagactgggactgagacacggcccagactcctacgggaggctgcagtggggaatcttgcgcaatgggcgaaagcctgacgcagcaacgccgcgtgggggacgacagccttcgggtcgtaaacctcttttcctgccaacgaaggttccaggtattcttgggattgactgtacgc

SEQ ID NO: 9539 - DNA, 490 bp, unidentified
  misc_feature 1..490: note = Ascusbbf_1278879, encodes 16S rRNA
  source 1..490: mol_type = genomic DNA
agagtttgatcctggctcagattgaacgctggcggcaggcttaacacctgcaagtcgaacggtaacggggagaaagcttgctttctttgccgacgagtggcggacgggtgagtaatgcttgggaatctggcttatggagggggataactacgggaaactgtagctaataccgcgtaatgtctatggactaaagggtgggactttcgggccacctgccataagatgagcccaagtgggattaggtagttggtggggtaaaggcctaccaagcctgcgatctctagctggtctgagaggatggccagccacactggaactgagacacggtccagactcctacgggaggcagcagtggggaatattgcacaatggggggaaccctgatgcagccatgccgcgtgaatgaagaaggccttagggttgtaaagttctttcggtgatgaggaaggagcataatttaatagattatgctattgacgttaatcacaga

SEQ ID NO: 9540 - DNA, 490 bp, unidentified
  misc_feature 1..490: note = Ascusbbf_1621183, encodes 16S rRNA
  source 1..490: mol_type = genomic DNA
agagtttgatcatggctcaggatgaacgctggcggcgtgcttaacacatgcaagtcgaacggagttataaagacgaagccctcgggcctaggctttgtaacttagtggcgaacgggtgagtaacacgtgagtaacctgcctatttccgggggataacaacgggaaaccgttgctaataccgcataaactgtcgaggtggcatcactttgacaggaaagatttatcgggaatagaggggctcgcgtccgattagttagttggtggggtaatggcctaccaagaccgcgatcggtagccggactgagaggttgatcggccacattgggactgagacacggcccagactcctacgggaggcagcagtggcgaatattgggcaatgggcgcaagcctgacccagcaacgccgcgtgaaggaagaaggctttcgggttgtaaacttctttggccagggacgataatgacggtacctggagaacaagccacggcta

SEQ ID NO: 9541 - DNA, 490 bp, unidentified
  misc_feature 1..490: note = Ascusbbf_502970, encodes 16S rRNA
  source 1..490: mol_type = genomic DNA
agagtttgatcatggctcaggatgaacgctggcggcgtgcctaacacattcaagtcgaacgggacttatttggtagcaataccggataagtttagtggcggacgggtgagtaacgcgtgagcaatctgcctccggttgcgggacaacacagggaaacttgtgctaataccgcataaaccggcagcaccgcatggtgcaaccggcaaagaatttcgaccggagatgagctcgcgtccgattagatagttggcggggcaacggcccaccaagtctgcgatcggtagccggactgagaggttgaacggccacattggaactgagatacggtccagactcctacgggaggcagcagtggggaatattgggcaatgggcgaaagcctgacccagcgacgccgcgtgaaggaagaaggtcttcggattgtaaacttcagtcaacagggaagatcatgacggtacctgtggaggaagccacggctaactacgtgcca

SEQ ID NO: 9542 - DNA, 490 bp, unidentified
  misc_feature 1..490: note = Ascusbbf_852646, encodes 16S rRNA
  source 1..490: mol_type = genomic DNA
agagtttgatcatggctcaggacgaacgctggcggcgtgcttaacacatgcaagtcgaacgatgaaccggcttcggctggggattagtggcgaacgggtgagtaacacgtgggtaacctgccctcagcttggggataagcctgggaaactgggtctaatacccgatatgaccatctcgcgcatgtggggtggtggaaagtttttcggctggggatgggcccgcggcctatcagcttgttggtggggtgatggcctaccaaggcgacgacgggtagccggcctgagagggtgttcggtcacactgggactgagacacggcccagactcctacgggaggcagcagtggggaatattgcgcaatgggcgaaagcctgacgcagcgacgccgcgtgggggatgacggccttcgggttgtaaacctctgttgcccgcgacgaagcccttcggggtgacggtagtgggtgaggaagcaccggctgactacgtgcca

SEQ ID NO: 9543 - DNA, 490 bp, unidentified
  misc_feature 1..490: note = Ascusbbf_529676, encodes 16S rRNA
  source 1..490: mol_type = genomic DNA
agagtttgatcctggctcaggatgaacgctagcggcaggcctaacacatgcaagtcgaggggtagagcacttcggtgcttgagaccggcgcacgggtgcgtaacgcgtatgcaatctaccttatactaagggatagcccagagaaatttggattaataccttatagttaatagaattggcatcgattttattataaagatttattggtataagatgagcatgcgtcccattagttagttggtaaggtaacggcttaccaagacgatgatgggtaggggtcctgagagggagatcccccacactggtactgagacacggaccagactcctacgggaggcagcagtgaggaatattggtcaatggacggaagtctgaaccagccatgccgcgtgcaggatgaagcatctatggtgtgtaaactgcttttgtacgggaagaaaaaacattacgtgtaatgtactgacggtaccgtaagaataaggatcggcta

SEQ ID NO: 9544 - DNA, 490 bp, unidentified
  misc_feature 1..490: note = Ascusbbf_639474, encodes 16S rRNA
  source 1..490: mol_type = genomic DNA
agagtttgatcctggctcaggacgaacgctggcggcacgcttaacacatgcaagtcgaacggagctaaggagttcgctctttagcttagtggcggacgggtgagtaacacgtgagcaacctgcctttcagtgcggaatagcttctggaaacggatggtaataccgcataacgttacgggaccgcatgatcctgtaaccaaagaatttcgctgaaagatgggctcgcgtctgattagatagttggtggggtaacggcctaccaagtcgacgatcagtagccggactgagaggttgaacggccacattgggactgagacacggcccagactcctacgggaggcagcagtggggaatattgcacaatgggcgcaagcctgatgcagcgatgccgcgtggaggaagaaggttttcggattgtaaactcctgatctgagggacgataatgacggtacctcaggagaaagctccggctaactacgtgccagcagcc

SEQ ID NO: 9545 - DNA, 490 bp, unidentified
  misc_feature 1..490: note = Ascusbbf_588729, encodes 16S rRNA
  source 1..490: mol_type = genomic DNA
agagtttgatcatggctcagattgaacgctggcggcatgcctaacacatgcaagtcgcgcggacggtagcaataccgttagcggcggacgggtgaggaacacataggaatttgcctcagagcgggggatagcccagggaaacttggagtaataccgcatgatgtcgcaagaccaaagctggggaccgcaaggcctagcactctgagagaagcctatgtctgattagctagttggtagggtaatggcctaccaaggcgacgatcagtaactggtctgagaggacgatcagtcacaccggaactgagacacggtccggactcctacgggaggcagcagtggggaatattggacaatgggcgcaagcctgatccagcaatgccgcgtgtgtgaagaaggccttcgggttgtaaagcactttaagcagggaagaaaaaacgcgctctaacatagtgcgtcttgacggtacctgaagaataagcaccggctaact

SEQ ID NO: 9546 - DNA, 490 bp, unidentified
  misc_feature 1..490: note = Ascusbbf_1839215, encodes 16S rRNA
  source 1..490: mol_type = genomic DNA
agagtttgatcatggctcaggacgaacgctggcggcgtgcttaacacatgcaagtcgagcggaaaggccccttcgggggtactcgagcggcgaacgggtgagtaacacgtgagtaacctgcccttggcttcgggataagcccgggaaactgggtctaataccggataggacacatggctgcatggtctgtgtgtggaaagatttatcggctgaggatggactcgcggcctatcagtttgttggtggggtaatggcctatcaaggcgaagacgggtagccggcctgagagggcgaccggccacactgggactgagacacggcccagactcctacgggaggcagcagtggggaatcttgcgcaatgggcgaaagcctgacgcagcaacgccgcgtgagggatgacggccttcgggttgtaaacctctttcagcgctgacgaagcctttcggggtgacggtaggcgcagaagaagcaccggctaactacgtgc

SEQ ID NO: 9547 - DNA, 469 bp, unidentified
  misc_feature 1..469: note = Ascusbbf_1501917, encodes 16S rRNA
  source 1..469: mol_type = genomic DNA
agagtttgatcctggctcagaacgaacgctggcggcaggcttaacacatgcaagtcgaacgggcccttcggggtcagtggcagacgggtgagtaacgcgtgggaacgtgcccttcagtttggaataacccagggaaacttgggctaataccggatacgcccgcaaggggaaagatttatcgctgaaggatcggcccgcgtctgattagctagttggtgaggtaatggctcaccaaggcgacgatcaatagctggtctgagaggatgatcagccacattgggactgagacacggcccaaactcctacgggaggcagcagtggggaatattggacaatgggcgcaagcctgatccagccatgccgcgtgagtgatgacggccttagggttgtaaagctctttcagtggggacgataatgacggtacccgcagaagaagccccggctaacttcgtgccagcagccgcgtaat

SEQ ID NO: 9548 - DNA, 490 bp, unidentified
  misc_feature 1..490: note = Ascusbbf_1033709, encodes 16S rRNA
  source 1..490: mol_type = genomic DNA
agagtttgatcatggctcaggacgaacgctggcggcgtgcctaacacatgcaagtcgagcgggaaacttgaagcggagacttcggttgaagctttaagcggagagcggcggacgggtgagtaacgcgtgagtaacctgccctacagagggggataacacagtgaaaactgtgctaatacgccataacatataatattcgcatggataatatatcaaagatttatcgctgtaggatggactcgcgtctgattagcttgttggtagggtaacggcctaccaaggcgacgatcagtagccgaactgagaggttgatcggccacattgggactgagacacggcccagactcctacgggaggcagcagtggggaatattgcgcaatggggggaaccctgacgcagcaacgccgcgtgaaggaagaaggctttcgggtcgtaaacttttgtcttaggggacaaataatgacggtaccttaggaggaagccacggct

SEQ ID NO: 9549 - DNA, 490 bp, unidentified
  misc_feature 1..490: note = Ascusbbf_1900711, encodes 16S rRNA
  source 1..490: mol_type = genomic DNA
agagtttgatcatggctcaggatgaacgctagcggcaggcctaatacatgcaagtcgaacggtatcccgccttcgggtgggagagagtggcgcacgggtgcgtaacgcgtatgcaacctgccctttacagggggatagcccggggaaacccggattaataccccatgtttcctaatcccggcatcggggatagggcaaagcctttgggcggtatgggatgggcatgcgtaggattagctagttggcggtgtaacggaccaccaaggctgcgatccttaggggttctgagaggaaggtcccccacactggcactgagatacgggccagactcctacgggaggcagcagtagggaatattgggcaatgggcggaggcctgacccagccatgccgcgtgcaggaagacggcgttctgcgttgtaaactgcttttatacgggaagaaaaggcccatgcgtgggacattgccggtaccgtatgaataagcaccgg

SEQ ID NO: 9550 - DNA, 490 bp, unidentified
  misc_feature 1..490: note = Ascusbbf_1681202, encodes 16S rRNA
  source 1..490: mol_type = genomic DNA
agagtttgatcctggctcagattgaacgctggcggcaggcttaacacatgcaagtcgagcggtaacaggggtgcttgcacccgctgacaagcggcgaacgggtgagtaatgcataggaatctacctagtagagggggatagcccggggaaactcggattaataccgcatacgtcctacgggagaaagcaggggatcttcggaccttgcgctattagatgagcctatgtcggattagctagttggtggggtaaaggcctaccaaggcgacgatccgtagctggtctgagaggatgatcagccacactggaactgagacacggtccagactcctacgggaggcagcagtggggaatattggacaatgggggaaaccctgatccagccatgccgcgtgtgtgaagaaggccttcgggttgtaaagcactttaagcagggaggaaagggtgatggctaatatccattatcattgacgttacctgcagaataagc

SEQ ID NO: 9551 - DNA, 490 bp, unidentified
  misc_feature 1..490: note = Ascusbbf_813022, encodes 16S rRNA
  source 1..490: mol_type = genomic DNA
agagtttgatcatggctcaggacgaacgctggcggcgtgcataacacatgcaagtcacgggggcctttcggggcaaccggcgaacgggtgcgtaacacgtgagcaacctgccctggtgtggggcatagccggcctaacggccgggtaattccgcatacgatccttggggtgcatttctcgaggatgaaaccagtaatgggcactaggaggggctcgcggcctatcagcttgttggcgaggtaacggctcaccaaggcgacgacgggtagctggtctgagaggatgaccagccacattgggactgagatacggcccagactcctacgggaggcagcagtggggaatattgcgcaatggcctaacggctgacgcagcgacgccgcgtgagggatgaagcttttcggagtgtaaacctctgttgctcgggacgaattgccagatttctctggtttgacggtaccgagtgaggaagcaccggctaactccgtgc

SEQ ID NO: 9552 - DNA, 175 bp, unidentified
  misc_feature 1..175: note = Ascusbbf_313613, encodes 16S rRNA
  source 1..175: mol_type = genomic DNA
agagtttgatcctggctcagccactatgctgtaatccgtattccaactcacgctgtcctgcgtgagccctgcctctttgacctgcatggtgtagtcaccgatgtttgctttctcatcagccgccgagataatcgaaaagtccgcgaaggaatcgcctgccagcagccgcggtaat

SEQ ID NO: 9553 - DNA, 490 bp, unidentified
  misc_feature 1..490: note = Ascusbbf_515121, encodes 16S rRNA
  source 1..490: mol_type = genomic DNA
agagtttgatcatggctcaggacgaacgctggcggcgtgcttaacacatgcaagtcgagggcactccttcgggggtgaccggcgaacgggtgcgtaacacgtgagcaacctgcccgcttgtggggaatagccggcccaacggccgggtaataccgcatacgttccacggttcacctggactgtggaggaaagctttatgcgcaggcggaggggctcgcggcctatcagctagttggtgcggtaacggcgcaccaaggcattgacgggtagctggtctgagaggatggccagccacattgggactgcgacacggcccagactcctacgggaggcagcagtggggaatattgcgcaatggccgcaaggctgacgcagcgacgccgcgtgggggaggaaggttttcggatcgtaaacccctgttgcccgggacgaaccgctggtttagaccagcctgacggtaccgggtgaggaagcaccggctaactccgtg

SEQ ID NO: 9554 - DNA, 468 bp, unidentified
  misc_feature 1..468: note = Ascusbbf_711546, encodes 16S rRNA
  source 1..468: mol_type = genomic DNA
agagtttgatcatggctcagaacgaacgctggcggcaggcttaacacatgcaagtcgaacgccccgcaaggggagtggcagacgggtgagtaacgcgtgggaacctaccccttggtacgggatagctccgggaaactggagataataccgtatgtgtcctgagggacaaagattcatcgccaagggatgggcccgcgtcggattagctagttggtggggtaatggcctaccaaggcgacgatccgtagctggtctaagaggatgatcagccacattgggactgagacacggcccaaactcctacgggaggcagcagtggggaatattggacaatgggcgcaagcctgatccagccatgccgcgtgagtgatgaaggccctagggttgtaaagctctttcaccggtgacgataatgacggtagccggagaagaagccccggctaacttcgtgccagcagccgcggtaat

SEQ ID NO: 9555 - DNA, 470 bp, unidentified
  misc_feature 1..470: note = Ascusbbf_574582, encodes 16S rRNA
  source 1..470: mol_type = genomic DNA
agagtttgatcctggctcagaacgaacgctggcggcaggcttaacacatgcaagtcgaacgcacccttcggggtgagtggcagacgggtgagtaacgcgtgggaacctacctatcggttcggaataacttcgggaaaccgaaactaataccggatacgccccaagggggaaagatttatcgccgattgatgggcccgcgttggattagcttgttggtgaggtaacggctcaccaaggctgcgatccatagctggtctaagaggatgatcagccacactgggactgagacacggcccagactcctacgggaggcagcagtggggaatattggacaatgggcgaaagcctgatccagccatgccgcgtgagtgatgagggccttagggttgtaaagctctttcgctagggaagataatgacggtacctagtaaagaagccccggctaacttcgtgccagcagccgcggtaat

SEQ ID NO: 9556 - DNA, 245 bp, unidentified
  misc_feature 1..245: note = Ascusbbf_682189, encodes 16S rRNA
  source 1..245: mol_type = genomic DNA
agagtttgatcctggctcaggacgaacgctggcggcgtgcttaacacatgcaagtcgaacgagaattcgtggatagaggtttcggccaattgaagcggagaaaagtggcggacgggtgagtaacgcgtgaggaacctgcctttcagagggggacaacagttggaaacgactgctattggggacgagtagaagacggtacctgacgaataagccacggctaactacgtgccagcagccgcggtaat

SEQ ID NO: 9557 - DNA, 490 bp, unidentified
  misc_feature 1..490: note = Ascusbbf_751242, encodes 16S rRNA
  source 1..490: mol_type = genomic DNA
agagtttgatcctggctcaggatgaacgctagcggcaggcttaacacatgcaagtcgaggggcagcgcgaggtagcaatactttggcggcgaccggcgcaagggtgcgtaacgcgtgagcaacttgcccgcaacaggaggataaccggaggaaactccgactaatactgcgtagcaacggattgtggcatcacagaccgtttaaaggcgaaagctggttgcggataggctcgcgtgacattagctagatggcggggtaacggcccaccatggcgacgatgtctaggggttctgagaggaaggtcccccacactggtactgagacacggaccagactcctacgggaggcagcagtgaggaatattggacaatggtcggaagactgatccagccatgccgcgtgaaggctaaggtcctatggattgtaaacttcttttgtacgagaggaataaggtggacgtgtccaccgaggacagtatcgtacgaataag

SEQ ID NO: 9558 - DNA, 490 bp, unidentified
  misc_feature 1..490: note = Ascusbbf_1770991, encodes 16S rRNA
  source 1..490: mol_type = genomic DNA
agagtttgatcatggctcaggatgaacgctagcgacaggcctaacacatgcaagtcgaggggcagcacgtcttcggatggtggcgaccggcgcacgggtgagtaacgcgtatgcaacctacctgtaactgggggatagctccctgaaaggggaattaacaccgcataagaccacgctttcgcatggaagagtggtaaaatatttataggttacagatgggcatgcgtgacattagtttgttggtgaggtaacggctcaccaagactacgatgtctaggggttctgagaggaaggtcccccacactggtactgagacacggaccagactcctacgggaggcagcagtgaggaatattggtcaatgggcgcaagcctgaaccagccatgtcgcgtgcaggaagacggccctatgggttgtaaactgcttttgtatgggaagaaattgctcgacgtgtcgggcattgccggtaccatacgaataaggatcggt

SEQ ID NO: 9559 - DNA, 490 bp, unidentified
  misc_feature 1..490: note = Ascusbbf_1718157, encodes 16S rRNA
  source 1..490: mol_type = genomic DNA
agagtttgatcatggctcaggacaaacgctggcggcgtgcataacacatgcaagtcgaacgagattgtaggaaatggagtcttcggacaaagctttttacatgaaagtggcgaacgggtgagtaacacgtgagatacctgcccttcacagtgggatagccgttggaaacgacgattaataccgcatgagattgtagtatcgcatgatatagcaattaaagattttatcggtgaaggatggtctcgcgtctgattagctagttggtggggtaaaggcctaccaaggcgacgatcagtagccgatctgagagggtgtacggccacattgggactgagacacggcccaaactcctacgggaggcagcagtggggaattttgcacaatgggggaaaccctgatgcagcgacgccgcgtgaatgaagaaggccttcgggttgtaaagttctgtccttggtgaagataatgacagtaaccaagaagaaagccccgg

SEQ ID NO: 9560 - DNA, 490 bp, unidentified
  misc_feature 1..490: note = Ascusbbf_991045, encodes 16S rRNA
  source 1..490: mol_type = genomic DNA
agagtttgatcctggctcaggatgaacgctggcggcgtgcttaacacatgcaagtcgagcggatcttttacttcggtaaaagatcagcggcggacgggtgcgtaacatgtgggtaacctgcccttgtcaccgggataacacactgaaaagtgtgctaataccggataacatcccttttaggcatctttaggggatcaaagaacttcggacaaggatgggcccgcatctgattagctagttggtaaggtaacggcttaccaaggcgacgatcagtagccgacctgagagggtgatcggccacactggaactgagacacggtccagactcctacgggaggcagcagtggggaatcttgcacaatgggcgaaagcctgatgcagcaacgccgcgtgagcgatgaaggccttcgggtcgtaaagctctgtcctatgggaagataatgacggtaccataggaggaagccccggctaactacgtgccagcagccgc

SEQ ID NO: 9561 - DNA, 490 bp, unidentified
  misc_feature 1..490: note = Ascusbbf_1817183, encodes 16S rRNA
  source 1..490: mol_type = genomic DNA
agagtttgatcatggctcaggacgaacgctggcggcgtgcttaacacatgcaagtcgaacggagtgaaacgctgaattgatgtcagcttgctgatggattttcttgtttcacttagtggcggacgggtgagtaacgcgtgagtaacctgcctctgagtggggaataacgccctgaaaagagcgctaataccgcataatatacaggagccgcatgactcttgtatcaaagatttatcactgagagatggactcgcgtccgattagcttgttggtggggtaacggcccaccaaggcgacgatcggtagccggactgagaggttgaacggccacattgggactgagacacggcccagactcctacgggaggcagcagtgggggatattgcgcaatgggggaaaccctgacgcagcaacgccgcgtggaggatgacggttttcggattgtaaaccgctgtcaagagggacgaaacatgacggtacctctggagg

SEQ ID NO: 9562 - DNA, 490 bp, unidentified
  misc_feature 1..490: note = Ascusbbf_1304246, encodes 16S rRNA
  source 1..490: mol_type = genomic DNA
agagtttgatcctggctcaggatgaacgctggcggcgtgcctaacacatgcaagtcgaacggaactggttttgaagattctcttcggagatgattcgttactagtttagtggcggacgggtgagtaacgcgtgagtaacctgcccttgagagggggataacgttctgaaaagaacgctaataccgcataatactattgaaccgcatgatttaatagccaaaactccggtgctcaaggatggactcgcgtccgattagttagttggcggggtaacggcccaccaagacgacgatcggtagccggactgagaggttgaacggccacattgggactgagacacggcccagactcctacgggaggcagcagtgggggatattgcgcaatgggggaaaccctgacgcagcaacgccgcgtggatgaagacggttttcggattgtaaagtccttttcttggggacgaattttgacggtacccaaggaataagctcc

SEQ ID NO: 9563 - DNA, 484 bp, unidentified
  misc_feature 1..484: note = Ascusbbf_817500, encodes 16S rRNA
  source 1..484: mol_type = genomic DNA
agagtttgatcctggctcaggataaacgctggcggcgtgcctaaaacatgcaagtcgaacggacccttcggggttagtggcgaacggctgagtaacacgtgggtgacctgccttcgaacgggggataactgcccgaaagggtggctaataccgcagatgtcgatgcttcggtgtgtcgactgaaccgaatcagggttcggagaggggcctgcgtccgattagctagttggtggggtaagagcttaccaaggcgacgatcggtagctggtctgagaggatgatcagccagactgggactgcgagacggcccagactcctacgggaggcagcagttaggaattttgggcaatgggcgaaagcctgacccagcaacgccgcgtgggtgaagaaggccttcgggtcgtaaagcccttttcccagggaagatgatgacggtacctggggaatcagccccggctaactacgtgccagcagccgcggtaat

SEQ ID NO: 9564 - DNA, 490 bp, unidentified
  misc_feature 1..490: note = Ascusbbf_447632, encodes 16S rRNA
  source 1..490: mol_type = genomic DNA
agagtttgatcctggctcagagtgaacgctggcggcgtggttaagacatgcaagtcgaacgggactttaggtgtagcaatacgtttaaagtctagtggcgaacgggtgagtaatacgtgagcaatctgccctaaagcgggggataattcgccgaaaggtgaactaataccgcatgtggtccttggcggcatcgccgaggcactaaagcttgtaacggcactttaggaggagctcgcggcctatcagcttgttggcggggtaacagcccaccaaggctaagacgggtaactggtctgagaggatgatcagtcacactggaactgagacacggtccagacacctacgggtggcagcagtttcgaatcattcacaatgggcgcaagcctgatggtgcgacgccgcgtgagggatgaaggtcctcggattgtaaacctctgtcgatagggactaaacgctgcatgcataatgcagcctgaattaacctatggag

SEQ ID NO: 9565 - DNA, 196 bp, unidentified
  misc_feature 1..196: note = Ascusbbf_1521274, encodes 16S rRNA
  source 1..196: mol_type = genomic DNA
agagtttgatcctggctcaggggagactggacggcggtgaccgacacccgcgacgtcgatgagggcgcctcgaaggtcaaggtgacggagctgtcggccgaccagaccgccaacagcctcgacgacatcgccggcgccgtcgtcaacaacgacttcctgaagaacgccggactcgtcggccagcagccgcggtaat

SEQ ID NO: 9566 - DNA, 490 bp, unidentified
  misc_feature 1..490: note = Ascusbbf_1436094, encodes 16S rRNA
  source 1..490: mol_type = genomic DNA
agagtttgatcctggctcaggatgaacgctggcggcgtgcctaacacatgcaagtcgaacggaaaggattcttcggaattctttcagtgtcggacgggtgagtaacgcgtgggtaacctgccccatacaggtgaacaacagctgtaaacggctgctaataccgcataagcgcacagtgctgcatggtacagtgtgaaaagattttatcggtatgggatggacccgcgtctgattagctcgttgtaggggtaacggcccaccaagtcgacgatcagtagcctacctgagagggtgaccggcaacattgggaatgcgacacggccaaaattcctacggggggcagaagtgggggatattgcacaatgggcgaaagcctgatgcagcgacgccgcgtgagtgaggaagtatttcggtatgtaaagctctatcagcagggaagaaaatgacggtacctgactaagaagccccggctaactacgtgccagcagcc

SEQ ID NO: 9567 - DNA, 490 bp, unidentified
  misc_feature 1..490: note = Ascusbbf_1446114, encodes 16S rRNA
  source 1..490: mol_type = genomic DNA
agagtttgatcctggctcaggatgaacgctagcggcaggcttaacacatgcaagtcgaggggtaacgcggggtagcaatactctggcgacgaccggcgcacgggtgcgtaacgcgtatgcaacctacctgtaacaggggtataacggagagaaatttccactaatcccccatattgttattctttcgcatgttaggataacgaaagcctcgttggttacggatgggcacgcttgacattagctagttggtagggtaactgcttaccaagtcgacgatgtctaggggagctgagaggcttatcccgctcactggtactgcgacacggaccagacacctacgggaggaagcagtgaggaatattggtcaatggacggaagtccgaaccagccatgccgcgtggaggaagaaggtcctatgggttgtaaactccttttgttcgagagtaataagggctttgcgaagcccgatgagagtatcggacgaataagc

SEQ ID NO: 9568 - DNA, 343 bp, unidentified
  misc_feature 1..343: note = Ascusbbf_378190, encodes 16S rRNA
  source 1..343: mol_type = genomic DNA
agagtttgatcctggctcagattgaacgctggcggcaggcctaacacatgcaagtcgaacggtaacaggaaacagcttgctgtttcgctgacgagtggcggacgggtgagtaatgtctgggaaactgcctgatggagggggataactactggaaacggtagctaataccgcataacgtcgcaagaccaaagagggggaccttcgggcctcttgccatcggatgtgcccagatgggattagctagtaggtggggtaacggctcagtaccgttcgaatagggcggtaccttgacggtacctaaccagaaagccacggctaactacgtgccagcagccgcggtaat

SEQ ID NO: 9569 - DNA, 482 bp, unidentified
  misc_feature 1..482: note = Ascusbbf_457901, encodes 16S rRNA
  source 1..482: mol_type = genomic DNA
agagtttgatcctggctcagaacgaacgctggcggcacgcttaacacatgcaagtcgaacgagattacgggttcgctcgtaatttagtggcgcacgggtgaggaacgcgtgactacctgcctgttgatggtggataactccgggaaactggagctaatacagcatgagctcgagagaggaaagacgaaagtcgtcgacagaaggggttgcgtctgattaggtagttggtagggtaaaggcctaccaagccgatgatcagtagctggtctgagaggatggtcagccacactggaactgagacacggtccagactcctacgggaggcagcagtggggaatattggacaatgggcgaaagcctgatccagcgatgccgcgtgagtgatgaaggccttagggttgtaaagctcttttgacagggacgatgatgacggtacctgtagaataagcaccggctaactctgtgccagcagccgcggtaat

SEQ ID NO: 9570 - DNA, 470 bp, unidentified
  misc_feature 1..470: note = Ascusbbf_1519326, encodes 16S rRNA
  source 1..470: mol_type = genomic DNA
agagtttgatcatggctcaggattaacgctggcggtgtgcctaacacatgcaagtcgagcgccccttcgggggagcggcggacggctgagtaacacgttggtacctgccccaaacccgggaataagcgctggaaacggcgtctaatgcccgatagttctcttcggagtaaagatttatcggtttgggaggggcctgcgcccgattagcttgttggtgaggtaacggctcaccaaggctctgatcggtaggtggtctgagaggatgatcacccagactgggactgagacacggcccagactcctacgggaggcagcagtgaggaatcttgcacaatgggggaaaccctgatgcagcaacaccgcgtggaggaagaatgccttcgggttgtaaactccttttatctaggacgaacattgacggtactagatgaataaggactggctaaccacgtgccagcagccgcggtaat

SEQ ID NO: 9571 - DNA, 481 bp, unidentified
  misc_feature 1..481: note = Ascusbbf_947502, encodes 16S rRNA
  source 1..481: mol_type = genomic DNA
agagtttgatcctggctcaggataaacgctggcggcgtgcctaaaacatgcaagtcgaacggacacttcggtgttagcggcgaacggctgagtaacgcgtgggtgacctgccttcgaacgggggataactgcccgaaagggtggctaataccgcagatgttgcggcttcggtgctgtaactgaacttccggggttcggagaggggcctgcgcccgattagctagctggtggggtaacggcctaccagggcgacgatcggtagctggtctgagaggatgatcagccagactgggactgcgaacggcccagactcctacgggaggcagcagttaggaattttgggcaatgggcgaaagcctgacccagcaacgccgcgtgggtgatgaaggccttcgggtcgtaaagcccttttcccagggaagatgatgacggtacctggggaatcagccccggctaactacgtgccagcagccgcggtaat

SEQ ID NO: 9572 - DNA, 254 bp, unidentified
  misc_feature 1..254: note = Ascusbbf_506698, encodes 16S rRNA
  source 1..254: mol_type = genomic DNA
agagtttgatcatggctcaggacgaacgctggtggcgtgcttaacacatgcaagtcgaacgaggctgatatttagcttgctattttgatgccgagtggcaaacgggtgagtaacgcgtagacaacctgccgcaagggtttcggctcgtaaagctctgttgatggggacgaatgtgcgaaatgcgaacagtttttcgcgatgacggtacccgtcgaggaagccacggctaactacgtgccagcagccgcggtaat

SEQ ID NO: 9573 - DNA, 470 bp, unidentified
  misc_feature 1..470: note = Ascusbbf_1549508, encodes 16S rRNA
  source 1..470: mol_type = genomic DNA
agagtttgatcatggctcagaacgaacgctggcggcaggcctaacacatgcaagtcgaacgaagtcttcggacttagtggcgcacgggtgagtaacacgtgggaacgtacctttcagtggggaataacctcgggaaactgaggctaataccgcatacgcccttcgggggaaagatttatcgctgaaggatcggcccgcgtccgattagctagttggtgaggtaatggcttaccaaggcaacgatcggtacctggtctgagaggatgatcagccacactgggactgagacacggcccagactcctacgggaggcagcagtggggaatattggacaatgggcggaagcctgatccagccatgccgcgtgaatgatgaaggccttagggttgtaaagttctttcggtcacgacgatgatgacggtagtgacagaagaagccccggctaacttcgtgccagcagccgcggtaat

SEQ ID NO: 9574 - DNA, 490 bp, unidentified
  misc_feature 1..490: note = Ascusbbf_1044567, encodes 16S rRNA
  source 1..490: mol_type = genomic DNA
agagtttgatcatggctcaggataaacgctggcggcgcacataagacatgcaagtcgaacggacttaactatttgcttgcaaatagagcggttagtggcggactggtgagtaacacgtaagaaatctgcctatcagtggggaataacagtgagaaatcattgctaataccgcatatgccataagaatcgcatgattctagtgggaaaggagcaattcgctgatagatgagcttgcgtctgattagctagttggtggggcaacggcctaccaaggcaacgatcagtagccggactgagaggttgaacggccacattgggactgagatacggcccagactcctacgggaggcagcagtcgggaatattgcgcaatggaggaaactctgacgcagtgacgccgcgtataggaagaaggttttcggattgtaaagtccttttgttggggacgaaatttgacggtacccaacgaataagctccggctaactacgt

SEQ ID NO: 9575 - DNA, 490 bp, unidentified
  misc_feature 1..490: note = Ascusbbf_1633875, encodes 16S rRNA
  source 1..490: mol_type = genomic DNA
agagtttgatcatggctcagaataaacgctggcggcgtgcttaacacatgcaagtcgagcgcgaaaggccttcgggctgagtaaagcggcgaacgggtgagtaacgcgtgggaatcagcctttcagtgaggaataccctcgagaaatcgaggttaatactgcatacgtcttgaaaaagagaaagatggctctttgagctgtcgctgaaagatgagctcgcgtactattagctagttggtggggtaatggcctaccaaggcaatgatggttagccggcctgagagggtgtacggccacactggaacttagacacggtccagactcctacgggaggcagcagtgaggaatattgcgcaatgggcgaaagcctgacgcagcaacgccgcgtggaggatgaaggtcttaggattgtaaacttctgttaagtgggaagaaatgtccatgagaaatatgcatggaagatgacggtaccattagagaaagcaccggc

SEQ ID NO: 9576 - DNA, 490 bp, unidentified
  misc_feature 1..490: note = Ascusbbf_1593001, encodes 16S rRNA
  source 1..490: mol_type = genomic DNA
agagtttgatcatggctcagattgaacgctggcggcaggcttaacacatgcaagtcgagcgggaataggtagcttgctactgatttctagcggcggacgggtgagtaatacttaggaatctgcctattagtgggggacaacatctcgaaagggatgctaataccgcatacgccctacgggggaaaggaggggatcacttgtgacctttcgctaatagatgagcctaagtcggattagctagttggtggggtaaaggcctaccaaggcgacgatctgtagcgggtctgagaggatgatccgccacactgggactgagacacggcccagactcctacgggaggcagcagtggggaatattggacaatggggggaaccctgatccagccatgccgcgtgtgtgaagaaggccttatggttgtaaagcactttaagcgaggaggaggagctctaggttaataccttagaagcttggacgttactcgcagaataa

SEQ ID NO: 9577 - DNA, 490 bp, unidentified
  misc_feature 1..490: note = Ascusbbf_1542424, encodes 16S rRNA
  source 1..490: mol_type = genomic DNA
agagtttgatcctggctcaggatgaacgctagcgggaggcttaacacatgcaagtcgagcggtataatcccttcgggggttagagagcggcgcacgggtgagtaacgcgtatgcaacctaccttttaccggggaatagcccggagaaatttggattaatgccccatggttccttatgtctgcatggatttaaggataaagttgaggcggtaaaagatgggcatgcgtgacattagctagttgggggggtaacggcccaccaaggctacgatgtctaggggttctgagaggatgatcccccacactggtactgagacacggaccagactcctacgggaggcagcagtgaggaatattggtcaatgggcgcaagcctgaaccagccatcccgcatgaaggaagactgtactatgtattgtaaacttcttttctgcaagaagaacgtgccctacgtgtagggtagtgacggtattgcaggaataagcatcggc

SEQ ID NO: 9578 - DNA, 490 bp, unidentified
  misc_feature 1..490: note = Ascusbbf_599226, encodes 16S rRNA
  source 1..490: mol_type = genomic DNA
agagtttgatcctggctcaggatgaacgctagcggcaggcttaacacatgcaagtcgaggggtagaattagcttgctaatttgagaccggcgcacgggtgcgtaacgcgtatgcaatctgcctctcactgggggatagcccggagaaatccggattaataccccatggtattttagggtggcatcaccttattattaaagatttatcggtgagagatgagcatgcgtcccattagttagttggtgtggtaacggcacaccaagacgatgatgggtaggggtcctgagagggagatcccccacactggtactgagacacggaccagactcctacgggaggcagcagtgaggaatattggtcaatggacgcaagtctgaaccagccatgccgcgtgcaggatgacggtcctatggattgtaaactgcttttgtacgagaagaaacctttctacgtgtagaaagctgacggtatcgtaagaataaggatcggc

SEQ ID NO: 9579 - DNA, 490 bp, unidentified
  misc_feature 1..490: note = Ascusbbf_358040, encodes 16S rRNA
  source 1..490: mol_type = genomic DNA
agagtttgatcctggctcaggatgaacgctggcggcgtgcctaacacatgcaagtcgagcgtgaagttttggaacgacacttcggtagagtgaagaaacggaaagcggcggacgggtgagtaacgcgtaggtaacctgccccatacacagggatagcctagggaaacctggattaatacctgatgatgcgaaggagtcacatggctttttcgccaaagatttatcggtatgggatggacctgcgtctgattagttagttggtgaggtaacggctcaccaaggcagcgatcagtagccgacctgagagggtaatcggccacattggaactgagacacggtccaaactcctacgggaggcagcagtggggaatattgcacaatgggcgcaagcctgatgcagcaacgccgcgtgagcgaagaaggtcttcggatcgtaaagctctgtccttagggaagaaacaaatgacggtacctgaggaggaagccccgg

SEQ ID NO: 9580 - DNA, 468 bp, unidentified
  misc_feature 1..468: note = Ascusbbf_1733358, encodes 16S rRNA
  source 1..468: mol_type = genomic DNA
agagtttgatcatggctcagaacaaacgctggcggcaggcctaacacatgcaagtcgaacgcaccttcgggtgagtggcgcacgggtgagtaacacgtgggaatgtaccctttggttcggaataacgtttggaaacgaacgctaataccggatgagccctacgggggaaagatttatcgccaaaggagcagcccgcgtctgattaggtagttggtggggtaaaggcctaccaagccgacgatcagtagctggtctgagaggatgatcagccacactgggactgagacacggcccagactcctacgggaggcagcagtggggaatattggacaatgggcgcaagcctgatccagccatgccgcgtgagtgatgaaggccttcgggttgtaaagctctttcgcacacgacgatgatgacggtagtgtgagaagaagccccggctaacttcgtgccagcagccgcggtaat

SEQ ID NO: 9581 - DNA, 490 bp, unidentified
  misc_feature 1..490: note = Ascusbbf_1640611, encodes 16S rRNA
  source 1..490: mol_type = genomic DNA
agagtttgatcctggctcaggacgaacgctggcggcgtgcttaacacatgcaagtcgaacgaggatcagttggaagcttgcttttgactgattcgagtggcggacgggtgagtaacgcgtgaacaatctgtctcatacagggggataacgcatcgaaagatgtgctaataccgcataggaccacagagccgcatggcagaggggtgaaaggagcaatccggtatgaggtgagttcgcgtctgattagatagttggtgaggtaacggcccaccaagtcaacgatcagtagccgacctgagagggtgatcggccacattgggactgagacacggcccagactcctacgggaggcagcagtggggaatattgggcaatgggcgaaagcctgacccagcaacgccgcgtgaaggaagaaggttttcggatcgtaaacttctgtccttggtgaagaggaagagacggtagccaaggaggaagccccggctaacta

SEQ ID NO: 9582 - DNA, 470 bp, unidentified
  misc_feature 1..470: note = Ascusbbf_642526, encodes 16S rRNA
  source 1..470: mol_type = genomic DNA
agagtttgatcatggctcaggacgaacgctggcggcgtgcttaacacatgcaagtcgagcgcccacttcggtgggagcggcagacgggtgagtaacgcgtgggaatctacccagctctacggaataacccagggaaacttggactaataccgtatacgtccttcgagagaaagatttatcggagttggatgagcccgcgttggattagctagttggtggggtaatggcctaccaaggcgacgatccatagctggtctgagaggatgatcagccacactgggactgagacacggcccagactcctacgggaggcaacagtggggaatattggacaatgggcgaaagcctgatccagccatgccgcgtgagtgatgaaggccctagggttgcaaagctctttcaacggtgaagataatgacggtaaccgtagaagaagccccggctaacttcgtgccagcagccgcggtaat

SEQ ID NO: 9583 - DNA, 490 bp, unidentified
  misc_feature 1..490: note = Ascusbbf_1480923, encodes 16S rRNA
  source 1..490: mol_type = genomic DNA
agagtttgatcctggctcagggcgaacgctggcggcgtggattaggcatgcaagtcgagcgacagaccttcgggttatggagcggcgaacgggtgagtaacacgtgaataacctaccctctcattccggataattggctgaaaagccttgtaatacgggggaggttccagattgggcatcttaactggaacgaacaagcaattggtgcgaggcggggttcgcggattatcagctagttggtgaggtaatggctcaccaaggctacgacgattagctggtctgagaggatggtcagccacattggaactgagatactgtccagactcctacgggaggctgcagtcgagaatcttgggcaatgcacgaaagtgtgacccagcgacgccgcgtgcaggatgactgccctctgggttgtaaactgcttttacgggagaagaatcaatgacggtatcccgtgaataagccacggctaactacgtgccagcagccg

SEQ ID NO: 9584 - DNA, 490 bp, unidentified
  misc_feature 1..490: note = Ascusbbf_1076811, encodes 16S rRNA
  source 1..490: mol_type = genomic DNA
agagtttgatcctggctcaggacgaacgctggcggcgtgcctaacacatgcaagtcgaacggagacgaggcataagcttcccttcgggggagccgtttcgtcttagtggcggacgggtgagtaacgcgtgacaacctgccgtatgctgggggacaacagcgggaaactgctgctaataccgcataagccggggagggggcatccccatcccgggaaagatttatcggcatacgaggggtccgcgtccgattagccagttggcggggtgacggcccaccaaagcgacgatcggtagccggcctgagagggcggacggccacattgggactgagatacggcccaaactcctacgggaggcagcagtgggggatattgcacaatcgggggaaccctgatgcagcgacgccgcgtgggcgaagaagcgcttcggcgcgtaaagccctttcagcgggagggaaggagacggtacccgcagaagaagcaccggcta

SEQ ID NO: 9585 - DNA, 490 bp, unidentified
  misc_feature 1..490: note = Ascusbbf_1674819, encodes 16S rRNA
  source 1..490: mol_type = genomic DNA
agagtttgatcctggctcagattgaacgctggcggcatgcctaacacatgcaagtcgaacggcagcacagaggagcttgctccttgggtggcgagtggcggacgggtgagtaatgcatcgggacctacccagacgtgggggataacctcgggaaaccgggactaataccgcatacgtcctacgggagaaagcgggggaccttcgggcctcgcacggttggacggaccaatgtgcgattagctagttggtaaggtaatggcttaccaaggcgacgatcgctagctggtctgagaggatgatcagccacactgggactgagacacggcccagactcctacgggaggcagcagtggggaatattggacaatgggcgaaagccagatccagcaatgccgcgtgtgtgaagaaggccctcgggttgtaaagcacttttatcaggaacgaaataccacgggttaataacctatggggctgacggtacctgaggaat

SEQ ID NO: 9586 - DNA, 490 bp, unidentified
  misc_feature 1..490: note = Ascusbbf_451363, encodes 16S rRNA
  source 1..490: mol_type = genomic DNA
agagtttgatcctggctcagattgaacgctggcggcaggcctaacacatgcaagtcgagcggtaacaggggagcttgctcccgctgacgagcggcggacgggtgagtaacgcacaggaatctacccagtagcgggggatagcccggggaaactcggattaataccgcatacgccctacgggggaaagcaggggatctgatcttcggaaaggaccttgcactattggaagagcttgtgttggattagcttgttggtagggtaaaggcctaccaaggcgacgatccatagctggtctgagaggatgatcagccacaccggaactgagacacggtccggactcctacgggaggcagcagtggggaatattggacaatgggggcaaccctgatccagccatgccgcgtgtgtgaagaaggccttcgggttgtaaagcactttaagttgggaggaaggggtgttgattaatactcaacatcattgacgttaccaa

SEQ ID NO: 9587 - DNA, 227 bp, unidentified
  misc_feature 1..227: note = Ascusbbf_410106, encodes 16S rRNA
  source 1..227: mol_type = genomic DNA
agagtttgatcctggctcagcatatcgctgatggctttttcctgcgggcgcttctgcgaccactccgccgtacgtgtatcaacagcagagtcatccggcttttcagccgccgtctgctctgccggagcactgccagctgcagtatcggcagctgcagacttatcggcctgcggctgcgcagcagcatcagcagctgcctcaacagttgcgccagcagccgcggtaat

SEQ ID NO: 9588 - DNA, 490 bp, unidentified
  misc_feature 1..490: note = Ascusbbf_1815676, encodes 16S rRNA
  source 1..490: mol_type = genomic DNA
agagtttgatcctggctcaggatgaacgctgacagaatgcttaacacatgcaagtctttggcaaatctgtgcttgcatagcctagccaaggcggacgggtgagtaacgcgtaaagaacttaccctgcagacagggataacagacggaaacgactgataatacctgatataattgccagcacgcatgtgcccggcaatgaaaagtaatgctgcaggagagctttgcgtcctattagcttgttggtgaggtaacggctcaccaaggcgatgataggtagccggcctgagagggtgaacggccacaaggggactgagacacggcccttactcctacgggaggcggcagtggggaatattggacaatgggggcaaccctgatccagcaattctgtgtgcacgaagaaggttttcggattgtaaagtgctttcagcagggaagaagaaaagtgacggtacctgcagaagaagcgacggctaaatacgtgccagca

SEQ ID NO: 9589 - DNA, 490 bp, unidentified
  misc_feature 1..490: note = Ascusbbf_1820555, encodes 16S rRNA
  source 1..490: mol_type = genomic DNA
agagtttgatcctggcttaggatgaacgctggcggcgtgcttaacacatgcaagtcgaacggaatctatctgcggcggccttcgggcttaagcgtttagatttagtggcgaacgggtgagtaacacgtgagtaacctgcctatttccgggggataacaacgggaaaccgttgctaataccgcatatactatcttgacggcatcgtttagataggaaagatttatcgggaatagaggggctcgcgtccgattagttagttggtgaggtaaaggctcaccaagaccgcgatcggtagccggactgagaggttgaacggccacattgggactgagacacggcccagactcctacgggaggcagcagtggggaatattgggcaatgggcggaagcctgacccagcaacgccgcgtgaaggatgaaggttttcggattgtaaacttctttggccagggacgataatgacggtacctggagaacaagccacggcta

SEQ ID NO: 9590 - DNA, 490 bp, unidentified
  misc_feature 1..490: note = Ascusbbf_961622, encodes 16S rRNA
  source 1..490: mol_type = genomic DNA
agagtttgatcctggctcagagtgaacgctggcggcgtgcctaacacatgcaagtcgaacggagtaaattagcttgctagtttacttagtggcgcacgggtgagtaatatatagttaatctgccccttagaggaggacaacatttggaaacgaatgctaatactccatactcctttttaacataagttaaatcgggaaacgaattttgctaagggatgagactatattgtatcagctagttggtaaggtaagagcttaccaaggctttgacgcataactggtctgagaggatgaacagtcacattggaactgagacacggtccaaactcctacgggaggcagcagtggggaatattgcgcaatgggggaaaccctgacgcagcaacgccgcgtggaggatgacacttttcggagcgtaaactccttttctttgggaagaattatgacggtaccaaaggaataagcaccggctaactccgtgccagcagcc

SEQ ID NO: 9591 - DNA, 490 bp, unidentified
  misc_feature 1..490: note = Ascusbbf_1184473, encodes 16S rRNA
  source 1..490: mol_type = genomic DNA
agagtttgatcctggctcaggacgaacgctggcggcgtgcttaacacatgcaagtcgaacgagaatcaccggaaggagttttcggacaacggaaggtgaggaaagtggcggacgagtgagtaacacgtaggaacctgcctggtaatggtggatagcttcgggaaactggaggtaatacagcatgagctcgagagaggaaaggccttagggtcgttaccagaggggcctgcggatgattaggtagttggtggggtaagagcctaccaagccgacgatcaatagctggtctgagaggatgatcagccacactggaactgagatacggtccagacttctactggaggcagtagtggggaatattggacaatggggggaaccctgatccagcgatgctgcgtgagtgaagaaggccttagggttgtaaagctcttttgacagggacgatgatgacggtacctgtagaataagcaccggctaactctgtgccagc

SEQ ID NO: 9592 - DNA, 468 bp, unidentified
  misc_feature 1..468: note = Ascusbbf_1537048, encodes 16S rRNA
  source 1..468: mol_type = genomic DNA
agagtttgatcatggctcagaacgaacgctggcggcatgcctaacacatgcaagtcgaacgcaccttcgggtgagtggcggacgggtgagtaacgcgtgggaacctgcctatcagtacggaataaccaagggaaactctggctaataccgtatacgtccttcgggagaaagatttatcgctgatagatgggcccgcgtccgattagcttgttggcggtgtaatggaccaccaaggcgacgatcggtagctggtcttagaggatgatcagccacactgggactgagacacggcccagactcctacgggaggcagcagtggggaatattggacaatgggcgaaagcctgatccagcaatgccgcgtgagtgatgaaggccttagggttgtaaagctcttttaccagggaagatgatgactgtacctggagaataagccccggctaactccgtgccagcagccgcggtaat

SEQ ID NO: 9593 - DNA, 490 bp, unidentified
  misc_feature 1..490: note = Ascusbbf_1621589, encodes 16S rRNA
  source 1..490: mol_type = genomic DNA
agagtttgatcctggctcagattgaacgctggcggtatgcttaacacatgcaagtcgaacggcagcacgagagagtttactcttttggtggcgagtggcggacgggtgagtaatacataggaatctgccttatagtttgggataactactcgaaagagtggctaataccggatgtggactacggtttaaagcaggggatcttcggaccttgcgctataagatgagcctatgcaagattagctagttggtgaggtaaaggctcaccaaggcgacgatctttagctggtctgagaggatgatcagccaaactgggactgagacacggcccagactcctacgggaggcagcagtggggaatattggacaatgggcggaagcctgatccagcaataccgcgtgtgtgaagaaggccttcgggttgtaaagcacttttgtcagggagaatgctagtagaggttaataccctttgctattgatgttacctgaagaa

SEQ ID NO: 9594 - DNA, 490 bp, unidentified
  misc_feature 1..490: note = Ascusbbf_1095479, encodes 16S rRNA
  source 1..490: mol_type = genomic DNA
agagtttgatcatggctcaggacgaacgctggcggcgtgcttaacacatgcaagtggagcgacgaaccagggcttgccctggggcagagccgcgaacgggtgagtaacacgtgggcaacctgccccgatgactgggacaacccgaggaaactcgggctaataccggatgtgctccctcacatcagtgagacgagtaaaggaagcttcggcctccgcatcgggatgggcccgcggcccattagcttgttggtggggtaacggcccaccaaggcaacgatgggtagctggtctgagaggacgatcagccacactgggactgagacacggcccaaactcctacgggaggcagcagtggggaatattgcacaatgggggaaaccctgatgcagcgacgccgcgtgagtgaagaagtatttcggtatgtaaagctctatcagcagggaagaagatgacggtacctgcagaagcagccccggctaactacgtgcca

SEQ ID NO: 9595 - DNA, 490 bp, unidentified
  misc_feature 1..490: note = Ascusbbf_856132, encodes 16S rRNA
  source 1..490: mol_type = genomic DNA
agagtttgatcctggctcaggatgaacactaacgacaggcttaacacatgcaaatcgaggggcagcgcgggagtgacaacactcctaacggcgaccggcgcactaataaataacacatatgcaacctgccccggacaggggaataaacccagaaaactgggcctaataccccatagacctaaagggtacatgccttcaaaatggaagatccgtcggtccgaaataagcatgcggcgcattaactagttggcggagcaacaacccaccaagacaacaatacgtaggggttctaaaagaaaaatcccacacactggtactaaaacacagaccagactcctacaggaggcagcagtgaggaatattggtcaatggtcgggagactaaaccagccaagtcgcgtgcgggataaaggccctccgggtcgtaaaccgctttagccggggagtaacgtgggggacgtgtcccccagtgagagtacccggagaataag

SEQ ID NO: 9596 - DNA, 484 bp, unidentified
  misc_feature 1..484: note = Ascusbbf_812679, encodes 16S rRNA
  source 1..484: mol_type = genomic DNA
agagtttgatcctggctcagaacgaacgctggcggcatgcttaacacatgcaagttgaacgcagaataggacttcggttctattgctgagtagcaaacgggtgagtaacgcgtgggaatctacctttttgtgggggataactgagggaaacttcagctaataccgcataagctctacggaggaaaggcttcggccgcaagaagaggagcccgcgtcagattaggtagttggtagggtaaaagcctaccaagccaatgatctgtagctggtctgagaggatgatcagccacactgggactgagacacggcccagactcctacgggaggcagcagtggggaatattggacaatgggggaaaccctgatccagcaatgccgcgtgaatgaagaaggccttagggttgtaaagttctttcacctgtgacgataatgacggtagcaagagaagaagccccggctaactccgcgccagcagccgcggtaa

SEQ ID NO: 9597 - DNA, 490 bp, unidentified
  misc_feature 1..490: note = Ascusbbf_1363581, encodes 16S rRNA
  source 1..490: mol_type = genomic DNA
agagtttgatcctggctcaggatgaacgctggcggcgtgcttaacacatgcaagtcgaacgaagacatctgagtgcttgcacttggatggactgagtggcggacgggtgagtaacgcgtgagcaacctgcccttcagagggggatagcgtttggaaacgaacggtaataccgcataacgtattttaaccgcatgattgaaataccaaaactacggtgctgaaggatgggctcgcgttggattagatagttggtggggtaacggcctaccaagtcgacgatccatagccggactgagaggttgaacggccacattgggactgagacacggcccagactcctacgggaggcagcagtggggaatattgcacaatgggggaaaccctgatgcagcaacgccgcgtgaaggaagacggttttcggattgtaaacttctgttcttagtgaagaataatgacggtagctaaggagcaagccacggctaactacgtg

SEQ ID NO: 9598 - DNA, 483 bp, unidentified
  misc_feature 1..483: note = Ascusbbf_712413, encodes 16S rRNA
  source 1..483: mol_type = genomic DNA
agagtttgatcctggctcagaacgaacgctggcggcaggcctaacacatgcaagtcgaacgagcacgacccagcttgctgggtacggctagtggcagacgggtgcgtaacacgtgggaaccttcccttgagtcaggaataacagttggaaacgactgctaatacctgatatcccctgagggggaaagatttatcgctcaaggatgggcccgcggcagattagctagttggtagggtaacggcctaccaaggcgacgatctgtagctggtctgagaggatgatcagccacactggaactgagacacggtccagactcctacgggaggcagcagtgaggaatattggacaatgggcgaaagcctgatcagccatgccgcgtgagtgaagaaggccttagggttgtaaaactcttttagcagggaagataatgacggtacctgcagaaaaagctccggctaactccgtgccagcagccgcggtaat

SEQ ID NO: 9599 - DNA, 490 bp, unidentified
  misc_feature 1..490: note = Ascusbbf_1564437, encodes 16S rRNA
  source 1..490: mol_type = genomic DNA
agagtttgatcctggctcagattgaacgctggcggcaggcttaacacatgcaagtcgagcggagcgagggtgcttgcaccttagcttagcggcggacgggtgagtaatgcttaggaatctgcctattagtgggggacaacgtttcgaaagggacgctaataccgcatacgccctacgggggaaagcaggggatcacttgtgaccttgtgctaatagatgagcctaagtcggattagctagttggtggggtaaaggcctaccaaggcgacgatctgtagcgggtctgagaggatgatccgccacactgggactgagacacggcccagactcctacgggaggcagcagtggggaatattggacaatgggggcaaccctgatccagccatgccgcgtgtgtgaagaaggccttttggttgtaaagcactttaagtggggaggaggctctcgatgctaatatcatcgaagagtggacgttaccacagaataagc

SEQ ID NO: 9600 - DNA, 473 bp, unidentified
  misc_feature 1..473: note = Ascusbbf_600318, encodes 16S rRNA
  source 1..473: mol_type = genomic DNA
agagtttgatcctggctcagagcgaacgctggcggcaggcttaacacatgcaagtcgaacgggcaccttcgggtgtcagtggcagacgggtgagtaacacgtgggaacgtgtcctccggtccgggataactcatggaaacgtgagctaataccggatacgtgcttatggcagaaaggtttactgccggaggatcggcccgcgtctgattagctagttggtggggtaacggcctaccaaggcgacgatcagtagctggtctgagaggatgatcagccacactgggactgagacacggcccagactcctacgggaggcagcagtggggaatattggacaatgggcgcaagcctgatccagccatgccgcgtgagtgatgacggccttagggttgtaaagctcttttctccgggacgataatgacggtaccggaggaataagccccggctaacttcgtgccagcagccgcgataat

SEQ ID NO: 9601 - DNA, 490 bp, unidentified
  misc_feature 1..490: note = Ascusbbf_924478, encodes 16S rRNA
  source 1..490: mol_type = genomic DNA
agagtttgatcctggctcaggacgaacgctggcggcgtgcttaacacatgcaagtcgagcggaaaggccttacggggtactcgagcggcgaacgggtgagtaacacgtgagtgacctgcccttcacttggggataagccttggaaacggggtctaatacccaatattcactgtctgttgcatgacaggtggtggaaagcttttgtggtggaggatgggctcgcggactatcagcttgttggtggggtgatggcctaccaaggctttgacggttagccggcctgagagggtgtccggccacactgggactgagacacggcccagactcctacgggaggcagcagtggggaatattgcgcaatgggcggaagcctgacgcagcgacgccgcgtgagggatgacggccttcgggttgtaaacctctttcgacaccgacgaagcgaaagtgacggtaggtgtagaagaagcaccggccaactacgtgccagcag

SEQ ID NO: 9602 - DNA, 458 bp, unidentified
  misc_feature 1..458: note = Ascusbbf_500004, encodes 16S rRNA
  source 1..458: mol_type = genomic DNA
agagtttgatcctggctcagaataaatgctatcggtatgcttaacacatgcaagttaaatgttaaaaacatagcgaacgggtgagtaacacgtgaattatctaccttttaattcaggataattatttttataaaaatactgaataaataaattaaagttttttaacgttagaagatgagtttgcgcaagattatggtagttggtagtttaaaagactaccaagcctattatctttagctgatttgaaagaatgatcagccacattgggactgagacacggcccaaacttttttaaaggcagcagtggggaattttggacaatgagcgaaagcttgatccagcaacaccgagtgagtgaaggaggctaattaggttgtaaagctctttcattaaggaggagaatgacagtacttaaaaaagaagttccggctaatacccgtgccagcagccgcggtaat

SEQ ID NO: 9603 - DNA, 490 bp, unidentified
  misc_feature 1..490: note = Ascusbbf_1113633, encodes 16S rRNA
  source 1..490: mol_type = genomic DNA
agagtttgatcctggctcaggacgaacgctggcggcgtgcttaacacatgcaagtcgagcggtaaggctccttcgggagtacacaagcggcgaacgggtgagtaacacgtgagcaatctgcccttcacttcggaataaccccgggaaactggggctaataccggataccaaccacaggtggcatcatctgcggttgaaagccccggcggtgaaggatgagctcgcggcctatcagctagttggtgaggtaaaggcccaccaaggcaacgacgggtagccggcctgagagggtgaccggccacactgggactgagacacggcccagactcctacgggaggcagcaatggggaatattggacaatgggcgaaagcctgatccagcaacgccgcgtgagggatgacggccttcgggttgtaaacctctttcatccacgacgaagcgcaagtgacggtagtggaacaagaagcaccggccaactacgtgccagc

SEQ ID NO: 9604 - DNA, 490 bp, unidentified
  misc_feature 1..490: note = Ascusbbf_469419, encodes 16S rRNA
  source 1..490: mol_type = genomic DNA
agagtttgatcatggctcagattgaacgctggcggcaggcttaacacatgcaagtcgagcgggggaaggtagcttgctaccggacctagcggcggacgggtgagtaatgcttaggaatctgcctattagtgggggacaacatctcgaaagggatgctaataccgcatacgtcctacgggagaaagcaggggatcttcggaccttgcgctaatagatgagcctaagtcggattagctagttggtggggtaaaggcctaccaaggcgacgatctgtagcgggtctgagaggatgatccgccacactgggactgagacacggcccagactcctacgggaggcagcagtggggaatattgggcaatgggcgaaagccttacccagcaatgccgcgtgaatgattgaaggtcttcggattgtaaagttcttttattggtgacgaacaaaatgacggtagccgatgaataagccccggctaactacgtgccagcag

SEQ ID NO: 9605 - DNA, 490 bp, unidentified
  misc_feature 1..490: note = Ascusbbf_1664916, encodes 16S rRNA
  source 1..490: mol_type = genomic DNA
agatttgatcatggctcaggatgaacgctagctacaggcttaacacatgcaagtcgaggggcagcatgaaggtagcttgctacctttgatggcgaccggcgcacgggtgcgtaacgcgtatccaatctgccgcttactcggggccagccttgcgaaagtaagattaatacccgatgttgtgcattaatcgcatgattggtgtaccaaagattaatttcggtaagcgatgaggatgcgtccgattagttagttggcggggtaacggcccaccaaggcgacgatcggtaggggttctgagaggatgatcccccacactggtactgagacacggaccagactcctacgggaggcagcagtgaggaatattggtcaatggccgagaggctgaaccagccaagtagcgtgcaggatgactgccttacaggttgtaaactgcttttatgcgggggtaaagtgaggcacgtgtgcctttttgcaagtaccgcatgaa

SEQ ID NO: 9606 - DNA, 490 bp, unidentified
  misc_feature 1..490: note = Ascusbbf_903864, encodes 16S rRNA
  source 1..490: mol_type = genomic DNA
agagtttgatcctggctcagaacgaacgctggcggcaggcttaacacatgcaagttgagcgggaactgagggtagcttgctacttgaggggagagcagcgcattggtgagtaacacgtgggaacataccttttggtgggggacaacagttggaaacgactgctaataccgcataagccctaagggggaaagattaattgccgaaagattggcccgcggaagattaggtagtaggtggggtaacggcctacctagccgacgatctatagctggtctgagaggacgatcagccacattggaactgagacacggtccagactcctacgggaggcagcagtgaggaatattgggcaatggaggaaaccctgaacgagcaatgccgcgtgaaggatgacggtcctatggattgtaaacttctgttgttagggaagaattacctatgtaggaaatgacataggagtgacggtacctttcaagaaagctccggctaa

SEQ ID NO: 9607 - DNA, 490 bp, unidentified
  misc_feature 1..490: note = Ascusbbf_1421893, encodes 16S rRNA
  source 1..490: mol_type = genomic DNA
agagtttgatcctggctcaggacgaacgctggcggcgtgcttaacacatgcaagtcgaacggtgaacctgcttcggtgggggatcagtggcgaacgggtgagtaacacgtgggcaacctgcccctggctctgggataactccaagaaattggggctaataccggatgtgaccgctgaccgcatggtctggtggtggaaagatttatcggctggggatgggcccgcggcctatcagcttgttggtggggtagtggcctaccaaggcgacgacgggtagccggcctgagagggtgaccggccacactgggactgagacacggcccagactcctacgggaggcagcagtggggaatattgcgcaatgggcggaagcctgacgcagcgacgccgcgtgggggatgacggccttcgggttgtaaacctctttcagtagggacgaagcggaagtgacggtacctacagaagaagcaccggccaactacgtgccagc

SEQ ID NO: 9608 - DNA, 470 bp, unidentified
  misc_feature 1..470: note = Ascusbbf_1267528, encodes 16S rRNA
  source 1..470: mol_type = genomic DNA
agagtttgatcatggctcagaacgaacgctggcggcaggcttaacacatgcaagtcgaacgcactcctcggagtgagtggcagacgggtgagtaacgcgtgggaaactacctggtggtctggaataacttggggaaactcaagctaataccggatgtgcccttcgggggaaagatttatcgccattggacgtgcccgcgtcggattagctagttggtgaggtaatggctcaccaaggctacgatccgtagctggtcttagaggatgatcagccacactgggactgagacacggcccagactcctacgggaggcagcagtggggaatattggacaatgggcgcaagcctgatccagccatgccgcgtgagtgatgaaggccttagggttgtaaagctctttcgccggggaagataatgacggtacccggagaagaagccccggctaacttcgtgccagcagccgcggtaat

SEQ ID NO: 9609 - DNA, 490 bp, unidentified
  misc_feature 1..490: note = Ascusbbf_1815330, encodes 16S rRNA
  source 1..490: mol_type = genomic DNA
agagtttgatcctggctcaggacgaacgctggcggcgtgcttaacacatgcaagtcgaacgaggtccatgcagtcgcaagactgcggaagacctagtggcgaacgggtgcgtaacacgtgaggaacttgtcccggtctctggaataacaagtggaaacacttgctaataccggatgacgtcggatcatcgcatggtgaactgacgaaagggttaccggatcgggagagcctcgcggcctatcagcttgttggtgaggtaacggctcaccaaggcatcgacgggtagctggtctgagaggatgatcagccacactgggactgagacacggcccagactcctacgggaggcagcagtggggaatcttgcacaatgggcgaaagcctgatgcagcaacgccgcgtgcgggaagaaagccttagggttgtaaaccgctttcagcagggaagaaaatgacggtacctgtagaagaaggtgcggccaactacgtgc

SEQ ID NO: 9610 - DNA, 490 bp, unidentified
  misc_feature 1..490: note = Ascusbbf_1050328, encodes 16S rRNA
  source 1..490: mol_type = genomic DNA
agagtttgatcatggctcagaacgaacgctggcggcgtgcctaacacatgcaagtcgaacgagaaagcccttcggggtgagtatagtggcgcacgggtgagtaatgcataggaacgtacctctttgtggggaataacgacgggaaaccttcgctaataccgcatgatgtcgtaagaccaaaggtggcctctacttgtaagctaccgcagagagatcggcctatgtcccattagctagttggcggggtaatagcccaccaaggcaacgatgggtagctggtctgagaggacgatcagtcacactggaactgagacacggtccagactcctacgggaggcagcagtggggaatattgcacaatgggcggaagcctgatgcagcaacgccgcgtgagtgaagaaggatcttggttcgtaaagctctttcggcagggaagaagggtacctaggtaaataatctaggaacttgacggtacctgcataagaagcac

SEQ ID NO: 9611 - DNA, 490 bp, unidentified
  misc_feature 1..490: note = Ascusbbf_792056, encodes 16S rRNA
  source 1..490: mol_type = genomic DNA
agagtttgatcctggctcaggacgaacgctggcggcgtgcttaacacatgcaagtcgaacggagctatgttttgaagttcctcggaatgaatttatatagcttagtggcggacgggtgcataacacgtgagtaatctgccctgaagtggggaacaacacaccgaaaggtgtgctaataccgcataacgcagctttgccgcatgacagagctgtcaaagatttatcgctttaggatgagctcgcggccgattaggcagttggcggggtaatggcccaccaaaccgacgatcggtagccggactgagaggttgaccggccacattgggactgagatacggcccagactcctacgggaggcagcagtggggaatattgcgcaatgggggaaaccctgacgcagcaacgccgcgtgaaggatgaaggttttcggatcgtaaacttatgtcttcggggacgagaacggacggtacccgaggaggaagccacggct

SEQ ID NO: 9612 - DNA, 490 bp, unidentified
  misc_feature 1..490: note = Ascusbbf_627053, encodes 16S rRNA
  source 1..490: mol_type = genomic DNA
agatttgatcatggctcaggatgaacgctggcggcgtgcctaacacatgcaagtcgaacggggatactttagtagtaataccgaggtattctagtggcggacgggtgagtaacgcgtgagcaacctgcctttcagagggggacaacagctggaaacggctgctaataccgcataatatatttggacggcatcgtctgaatatcaaagatttatcgctgaaagatgggctcgcgtctgattagctagttggtggggtaagagcctaccaaggcgacgatcagtagccggactgagaggttgaacggccacattgggactgagatacggcccagactcctacgggaggcagcagtggggaatattggtcaatgggggaaaccctgaaccagcaacgccgcgtgaaggaagaaggctttcgggttgtaaacttctttgacaggggaagaaaaaaatgactgtaccctgaaaacaagccacggctaactacgtg

SEQ ID NO: 9613 - DNA, 487 bp, unidentified
  misc_feature 1..487: note = Ascusbbf_620403, encodes 16S rRNA
  source 1..487: mol_type = genomic DNA
agagtttgatcctggctcaggataaacgctggcggcgtgcttcaggcatgcaagtcgaacgggtagctttgctaccagtggcggacgggtgagtaacacgtaagcaacctgcccagaagtggggaataacccatcgaaaggtgagctaattccgcatatgatggttcctccctggaggggccattaaaggtttcggccgcttctggaggggcttgcgctcgattagctagttggtggggtaaaggcctaccaaggcaacgatcgatagctggtctgagaggacggtcagccacacggggactgagatacggccccgactcctacgggaggcagcagctaggaatcttgggaatgggcgaaagcctgacccagcaacgccgcgtgggcgatgaaggctctagggtcgtaaagcccttttgtgggggacgatagtgacggtaccccacgaataagccacggctaactacgtgccagcagccgcggtaat

SEQ ID NO: 9614 - DNA, 478 bp, unidentified
  misc_feature 1..478: note = Ascusbbf_1111155, encodes 16S rRNA
  source 1..478: mol_type = genomic DNA
agagtttgatcctggctcagattgaacgctggcggcatggttaaagcatgcaagtcgaacgagaaccaccttcgggtggggacagtggcgaaagggcgaggaacgcgatcgaacgtgccccgaggcgggggatggcgtcgggaaaccggcggtaataccccatgtgctctacggaggaaaggtttaccaccttgggagcggcgatcgtcctatcaggttgttggtgaggtaacggctcaccaagcctaagacgggtagcgggtgtgagagcatgacccgccgcatcgggactgagacactgcccggactcctacgggaggctgcagcgacgaatcttccgcaatgcgcgaaagcgtgacggagcaatgccgcgtgcaggatgaagcggctacgccgtgtaaactgctgtcaggtcctcgaaacactgatcaggaccaaaggaagggccggctaaactcgtgccagcagccgcggtaat

SEQ ID NO: 9615 - DNA, 490 bp, unidentified
  misc_feature 1..490: note = Ascusbbf_1290084, encodes 16S rRNA
  source 1..490: mol_type = genomic DNA
agagtttgatcctggctcaggacgaacgctggcggcgcgcctaacacatgcaagtcgaacggagcttaagagagcttgcttttttaagcttagtggcgaacgggtgagtaacgcgtgagtaacctgccctggagtgggggacaacagttggaaacgactgctaataccgcataagcccacagcaccgcatggtgcagcgggaaaaggatttattcggtacaggatgggcccgcatctgattagctagttggtgagataacagcccaccaaggcgacgatcagtagccgacctgagagggtgatcggccacattgggactgagacacggcccaaactcctacgggaggcagcagtggggaatattgcacaatgggcgaaagcctgatgcagcgacgccgcgtggaggaagaaggttttcggattgtaaactcctgtcgttagggacgaatcatgacggtacctaacaagaaagcaccggctaactacgtgc

SEQ ID NO: 9616 - DNA, 490 bp, unidentified
  misc_feature 1..490: note = Ascusbbf_893660, encodes 16S rRNA
  source 1..490: mol_type = genomic DNA
agagtttgatcctggctcaggacgaacgctggcggcacgcttaaaacatgcaagtcgaacgtgaagcccgggcttgcccgggtggaaagtggcgaacgggtgcgtaacacgtgagcaacctgccccgaagactgggataacaccgggaaaccggtgctaataccggatgccttcaccatgtcgcatggcgaggtgaagaaatggattccgcttcgggatgggctcgcggcctatcagcttgttggtggggtaatggcctaccaaggcaacgacgggtagctggtctgagaggatgtccagccacactgggactgagacacggcccagactcctacgggaggcagcagttaggaatcttgcgcaatgggcgaaagcctgacgcagcgatgccgcgtgcgggatgaaggccttcgggtcgtaaaccgctttcagcagggacgataatgacggtacctgcagaagaagccccggccaactacgtgccagcagc

SEQ ID NO: 9617 - DNA, 254 bp, unidentified
  misc_feature 1..254: note = Ascusbbf_896319, encodes 16S rRNA
  source 1..254: mol_type = genomic DNA
agagtttgatcctggctcagattgaacgctggcggcaggcctaacacatgcaagtcgaacggtaacaggaagcagcttgctgcttcgctgacgagtggcgcaagcctgatgcagccatgccgcgtgtatgaagaaggccttcgggttgtaaagtactttcagcggggagggagggagtaaagttaatacctttgctcattgacgttacccgcagaagaagcaccggctaactccgtgccagcagccgcggtaat

SEQ ID NO: 9618 - DNA, 490 bp, unidentified
  misc_feature 1..490: note = Ascusbbf_797536, encodes 16S rRNA
  source 1..490: mol_type = genomic DNA
agagtttgatcctggctcaggatgaacgctagcgacaggcttaacacatgcaagtcgaggggcagcggggatgagagcttgctcttatctgccggcgaccggcgcacgggtgagtaacacgtatgcaacctgcccaccgcagggggataagcagaagaaattctgtctaataccgcgtaacatcagagggagacatctctttctgatcaaaggaagcaattccggcggtggatgggcatgcggcgcattagctggttggcggggtaacggcccaccaaggcgacgatgcgtaggggttctgagaggaaggtcccccacactggtactgagacacggaccagactcctacgggaggcagcagtgaggaatattggtcaatgggcgagagcctgaaccagccaagtcgcgtgagggaagacggtcctatggattgtaaacctcttttgtcggggagcaacgaaggcacgtgtgcctgaagtgagattacccg

SEQ ID NO: 9619 - DNA, 490 bp, unidentified
  misc_feature 1..490: note = Ascusbbf_1151435, encodes 16S rRNA
  source 1..490: mol_type = genomic DNA
agagtttgatcctggctcaggatgaacgctagcggcaggcttaatacatgcaagtcgaggggcagcaggtctgtagcaatacagatgctggcgaccggcaaacgggtgaggaacacgtacgcaaccttccttcgagtggggaatagcccagggaaacttggattaataccccgtaatattatggagtggcatcactttataattatagcttcggcgcttgaagatgggcgtgcgcctgattaggtagttggcggggtaacggcccaccaagcctgcgatcagtaactggtgtgagagcacgaccagtcacagggcactgagacacgggcccgactcctacgggaggcagcagtaaggaatattgggcaatggacgaaagtctgacccagccatgccgcgtggaggatgaaggtcctctggattgtaaacttcttttatctggaaagaaatccatgttttctaatgtggttgacggtaccagatgaataag

SEQ ID NO: 9620 - DNA, 490 bp, unidentified
  misc_feature 1..490: note = Ascusbbf_541062, encodes 16S rRNA
  source 1..490: mol_type = genomic DNA
agagtttgatcatggctcaggatgaacgctggcggcgtgcttaacacatgcaagtcgagcggagatatttaggatgagagcttcggcaggatctttaaatatcttagcggcggacgggtgagtaacgtgtgggcaacctgccctgtactgtggaataatcactggaaacggtgactaataccgcatgtcatcacgaagaggcatctctttgtgagaaaaggatttattcggtacaggatgggcccgcatctgattagctagttggtgagataaaagctcaccaaggcaacgatcagtagccgacctgagagggtgatcggccacattgggactgagacacggcccaaactcctacgggaggcagcagtggggaatattgcacaatgggcgaaagcctgatgcagcaacgccgcgtgaaggaagaagggtttcggctcgtaaacttctatcaatagggacgaaaaaaatgacggtacctaaataagaagcc

SEQ ID NO: 9621 - DNA, 490 bp, unidentified
  misc_feature 1..490: note = Ascusbbf_540191, encodes 16S rRNA
  source 1..490: mol_type = genomic DNA
agagtttgatcatggctcaggatgaacgctagcggcaggcctaatacatgcaagtcgaacgggatccagatcaaagcttgctttggtttggtgagagtggcgcacgggtgcgttacgcgtgagcaacctacccatatctgggggatagcccggcgaaagtcggattaataccgcataagattacagaaaggcatcttttagtaattaaagatttatcggatatggatgggctcgcgtgacattagctagttggtaaggtaacggcttaccaaggctacgatgtctaggggctctgagaggagaatcccccacactggtactgagacacggaccagactcctacgggaggcagcagtaaggaatattggtcaatggacgcaagtctgaaccagccatgccgcgtgcaggaagacggccctatgggttgtaaactgcttttgtacgggaacaaacctcggtacgtgtaccgagctgagtgtactgtaagaat

SEQ ID NO: 9622 - DNA, 205 bp, unidentified
  misc_feature 1..205: note = Ascusbbf_1599570, encodes 16S rRNA
  source 1..205: mol_type = genomic DNA
agagtttgatcctggctcagcatttgccaccaaatcataagggtctaaaaagagactatctccagctagaatagccgtcgcttcattaaattttttgtggtttgtcaaacgtccacgacgatagtcatcatcatccatagctggtaaatcatcgtgaatcaagcttcctgtgtgaatcatctcaaggccagcagccggcggtaat

SEQ ID NO: 9623 - DNA, 490 bp, unidentified
  misc_feature 1..490: note = Ascusbbf_1640889, encodes 16S rRNA
  source 1..490: mol_type = genomic DNA
agagtttgatcatggctcaggacaaacgctggcagcatacttcatacatgcaagtcgaacgagaaactgacttcggtcagtggaaagtggcaaacaggtaagtaatatataaagaatctgccctaaaaagagggacaacagttgaaaacagctgctaatacctcatatgcgcgtacttggaatagtattcgtgaaaactccggtgctctgggatgagtctgcatctgattagctagttggcggtgtaatggaccaccaaggcgacgatcagtagctggtttgagaggatgatcagccacaatgggactgagacacggcccatactcctacaggaggcagcagtagggaattttgcgcaataggggaaaccctaacgcagcaacgccgcgtgattgaataagcccttcgggatataaagatctatcaataggaacgaaacttgacggtacctacagaggaagcatcggctaactccgtgccagcagccgcg

SEQ ID NO: 9624 - DNA, 486 bp, unidentified
  misc_feature 1..486: note = Ascusbbf_512190, encodes 16S rRNA
  source 1..486: mol_type = genomic DNA
agagtttgatcctggctcagaacgaacgctggcggcaggcttaacacatgcaagttgaacgggaggtaatggtgcttgcactattaccgagagtggcgcacgggtgagtaatacatgggaacataccctgaagtgggggacaacagttggaaacgactgctaataccgcataatccctgcgggggaaagatttatcgctttaggaatggcccatggcagattaggtagttggtggggtaaaggcttaccaagccgacgatctgtagctggtctgagaggacgatcagccacactggaactgagacacggtccagactcctacgggaggcagcagtgaggaatattgggcaatggagggaactctgacccagccatgccgcgtgagtgaagaaggttttcgaattgtaaagctctttcggatgtgaagatgatgacggtagcatctaaagaagccccggcaaacttcgtgccagcagccgcggtaat

SEQ ID NO: 9625 - DNA, 184 bp, unidentified
  misc_feature 1..184: note = Ascusbbf_606491, encodes 16S rRNA
  source 1..184: mol_type = genomic DNA
agagtttgatcctggctcagcatcgtcccgggtttaatctcgtcctcctcatcttgccagcagccgcggtaatagagtttgatcatggctcagccagcagccgcggtaatagagtttgatcatggctcagccagcagccgcggtaatagagtttgatcatggctcagccagcagccgcggtaat

SEQ ID NO: 9626 - DNA, 490 bp, unidentified
  misc_feature 1..490: note = Ascusbbf_1692775, encodes 16S rRNA
  source 1..490: mol_type = genomic DNA
agagtttgatcatggctcaggatgaacgctggcggcgtgcctaatacatgcaagtcgaacgctctagtagcaatactagggagtggcgaacgggtgagtaacacgtagataacctgccctaacttcgaggataacttcgggaaactggagctaatactggataggatgtcttgaggaatcttgggacatttaaagatttatcgagttaggaggggtctgcggcgcattagttagttggtggggtaacggcctaccaagacaatgatgcgtagccggactgagaggtctaacggccacattgggactgagaacggcccaaactcctacgggaggcagcagtagggaattttcggcaatgggggaaaccttgaccgagcaacgccgcgtgaacgaagaagttcttcggaatgtaaagttcttttatctgggaagaaaaataaccaaattgacggtaccagatgaataagccccggctaactatgtgccagca

SEQ ID NO: 9627 - DNA, 490 bp, unidentified
  misc_feature 1..490: note = Ascusbbf_1509621, encodes 16S rRNA
  source 1..490: mol_type = genomic DNA
agagtttgatcctggctcaggatgaacgctggcggcgtgcttaacacatgcaagtcgaacggagacaacccaccgagtgaagccttagcttgctttggccgacctcaccgggttatcttagtggcggacgggtgagtaacgcgtggataacctgcctgtatctgggggataacagttagaaatgactgctaataccgcataagcgcacggcaccgcatggtactgtgtgaaaaactccggtggatacagatggatccgcgttagattagccagttggcggggtaacggcccaccaaagcgacgatctatagccggcctgagagggcgaccggccacattgggactgagacacggcccaaactcctacgggaggcagcagtggggaatattgcacaatgggggaaaccctgatgcagcgacgccgcgtgagtgaagaagtatttcggtatataaagctctatcagcagggaagaaattgacggtacctgac

SEQ ID NO: 9628 - DNA, 490 bp, unidentified
  misc_feature 1..490: note = Ascusbbf_569549, encodes 16S rRNA
  source 1..490: mol_type = genomic DNA
agagtttgatcatggctcaggatgaacgctggcggcgtgcctaatacatgcaagtcgaacgagatgtagcaatacatcgagtggcgaacgggtgagtaacacgtattcaatctgccctaacgactgggataccctcgggaaaccttggctaataccggataggagctttgatcgcatgattgaagctttaaaggatcttttgattcacgataggatgagaatgcggcgcattagttagttggtgagataaaagcccaccaaggcaacgatgcgtagccgacctgagagggtgatcagccacactgggactgagacacggcccagactcctacgggagacagcagttaggaatattcgtcaatgggggaaaccctgaacgagcaatgccgcgtgaaggatgaaggtcctatggattgtaaacttctgttgttagggaagaacgactgatataggaaatgatatcagtgtgacggtacctttccagaaagct

SEQ ID NO: 9629 - DNA, 490 bp, unidentified
  misc_feature 1..490: note = Ascusbbf_1610187, encodes 16S rRNA
  source 1..490: mol_type = genomic DNA
agagttgatcctggctcaggatgaacgctggcggcgtgcctaatacatgcaagtcgagcgaatctttaggagcttgctcctaaaggttagcggcggacgggtgagtaacacgtgggcaacctacctgtaagactgggataacttcgggaaaccggagctaataccggataatatgtaagacctcatggtcttacattgaaagatggcctcggctatcacttacagatgggcccgcggcgcattagctagttggtgaggtaacggctcaccaaggcaacgatgcgtagccgacctgagagggtgatcggccacactgggactgagacacggcccagactcctacgggaggcagcagtagggaatcttccgcaatggacgaaagtctgacggagcaacgccgcgtgagcgatgaaggccttcgggtcgtaaagctctgttgttagggaagaacaagtatcattcgaatagggcggtaccttgacggtaccta

SEQ ID NO: 9630 - DNA, 486 bp, unidentified
  misc_feature 1..486: note = Ascusbbf_1431455, encodes 16S rRNA
  source 1..486: mol_type = genomic DNA
agagtttgatcctggctcagaacgaacgctggcggcacgcttaacacatgcaagtcggacaggatgaagttagtttactaatggaatttagtggcggactggtgagtataatacaagaatatgcccttaggtaggggatagctttgggaaactggaggtaataccgtataaggtcgagagagaaaagcagagatgcgcctgaggattagcctgtatctgattaggaagttggtagggtaaaggcctaccaatccgaggatcagtagctgttctgagaggaagatcagccacattgggactgagatacagcccagactcctacgagaggcagcagtgaggaatattggacaataggaaaaaccctgatccagcaatgccgcgtgaatgaagaaggttttcggattgtaaagttcttttcttagggaagatgatgacagtacctgaggaataagcaccggcaaactctgtgccagcagccgcggtaat

SEQ ID NO: 9631 - DNA, 490 bp, unidentified
  misc_feature 1..490: note = Ascusbbf_479080, encodes 16S rRNA
  source 1..490: mol_type = genomic DNA
agagtttgatcctggctcaggagaaacgctggcggcgcacataagacatgcaagtcgaacggaacttagtcgaatgtttacatgagacgaaagtttagtggcggacgggtgagtaacacgtgagcaacctgcctttaagagggggataacattgagaaatcagtgctaataccgcataacgcatttctaccgcatgatagaaatagccaaaggagaaatccgcttagagatgggctcgcggctgattagttagttggtggggtaatggcctaccaagacgatgatcagtagccgagctgagaggcacaacggccacattgggactgagacacggcccagactcctacgggaggcagcagtcgggaatattgcacaatgggggaaaccctgatgcagtgacgccgcgtataggaagaaggtctttggattgtaaagctctgttataggggacgaaggaagtgacggtaccctataaggaagccccggctaa

SEQ ID NO: 9632 - DNA, 490 bp, unidentified
  misc_feature 1..490: note = Ascusbbf_993166, encodes 16S rRNA
  source 1..490: mol_type = genomic DNA
agagtttgatcctggctcaggacgaacgctggcggcgtgcttaacacatgcaagtcgagcggtaaggctccttcgggagtacacgagcggcgaacgggtgagtaacacgtgagtaatctgcccttcacttcgggataaccaccggaaacggtggctaataccgaatacgaccagtcttcgcatgaggtgctggtggaaagtcttttcggtggaggatgtgctcgcggcctatcagcttgttggtggggtaatggcctaccaaggcttcgacgggtagccggcctgagagggtgaccggccacactgggactgagacacggcccagactcctacgggaggcagcagtggggaatattggacaatgggcgaaagcctgatccagcaacgccgcgtgagggatgacggccttcgggttgtaaacctctttcagtatcgacgaagcgccctgtcgggtggtgacggtagatacagaagaaggaccggccaacta

SEQ ID NO: 9633 - DNA, 489 bp, unidentified
  misc_feature 1..489: note = Ascusbbf_1695214, encodes 16S rRNA
  source 1..489: mol_type = genomic DNA
agagtttgatcctggctcaggatgaacgctggcggcgtgtctaaggcatgcaagtcgtatgcctgtagcaatacaggcatggcaaacgggagagtaacacattggcaacttaccccaaagacgaggataaccttgcgaaagcgaggataatactcgatggtattatccgccccagggcggataattaaagctccggcgctttgggagaggcctatggcctatcagctagttggtgaggtaacggctcaccaaggctatgacgggtatggggtgcgagagcatggccccactcactgggactgagacactgcccagactcctacgggaggctgcagtcaagaatcttcctcaatgggcgaaagcctgaaggagcgacgccgcgtgtatgaagaagcccttcggggtgtaaagtacttttatctgggacgaaacaatgacggtaccagatgaataaggggctgctaacctcgtgccagcagccgcggtaat

SEQ ID NO: 9634 - DNA, 490 bp, unidentified
  misc_feature 1..490: note = Ascusbbf_1788453, encodes 16S rRNA
  source 1..490: mol_type = genomic DNA
agagtttgatcctggctcaggacgaacgctggcggcgtgcctaatacatgcaagtcgagcgagtcccttcgggggctagcggcggacgggtgagtaacacgtaggcaacctgcctgtaagactgggataacatagggaaacttatgctaataccggatagggttttggatcgcatgatccgaaacggaaagatggcgcaagctattacttacagatgggcctgcggcgcattagctagttggtggggtaacagcctaccaaggcgacgatgcgtagccgacctgagagggtgaccggccacactgggactgagacacggcccagactcctacgggaggcagcagtagggaattttccacaatggacgaaagtctgatggagcaacgccgcgtgaacgatgaaggctctcgggtcgtaaagttctgttgttagggacgaacaagtgccgttcgaacagggcggcaccttgacggtacctaacgagaaagcc

SEQ ID NO: 9635 - DNA, 488 bp, unidentified
  misc_feature 1..488: note = Ascusbbf_1832455, encodes 16S rRNA
  source 1..488: mol_type = genomic DNA
agagtttgatcctggctcagaacgaacgctggcggcaggcttaacacatgcaagtcgagcgccccgcaaggggagcggcagacgggtgagtgacacgtgggaatctacccatcactacggaacaactccgggaaactggaactaataccgtatacgtccttcgggagaaagatttatcggtgatggatgagcccgcgttggattagctagttggtaaggtaacggcttaccaaggcgacgatgtctaggggagctgagaggcttatcccccacactggtactgagacacggaccagactcctacgggaggcagcagtgaggaatattggtcaatggacggaagtctgaaccagccatgccgcgtggaggaagaaggtcctatgggttgtaaactccttttgttccggagtaataaggtctatgcgtagaccgatgagagtacgggacgaataagcatcggctaactccgtgccagcagccgcggtaat

SEQ ID NO: 9636 - DNA, 490 bp, unidentified
  misc_feature 1..490: note = Ascusbbf_1122394, encodes 16S rRNA
  source 1..490: mol_type = genomic DNA
agagtttgatcctggctcagattgaacgctggcgacaggcttaacacatgcaagtcgaacggagaacctctgaacgagttttcggacaagtgatgagaattcttagtggcggacgggtgagtaacgcgtgaggaacctgccttggagaggggaataacacagagaaatttgtgctaataccgcataatgcagttgggtcgcatggctctgactgccaaagatttatcgctctgagatggcctcgcgtctgattagcttgttggcggggtaacggctcaccaaggcgacgatcagtagccggactgagaggctggccggccacattgggactgagacacggcccagactcctacgggaggcagcagtggggaatattgggcaatgggcgcaagcctgacccagcaacgccgcgtgaaggaagaaggctttcgggttgtaaacttcttttatgagggacgaagaaagtgacggtacctacagaagaagcacc

SEQ ID NO: 9637 - DNA, 490 bp, unidentified
  misc_feature 1..490: note = Ascusbbf_797700, encodes 16S rRNA
  source 1..490: mol_type = genomic DNA
agagtttgatcctggctcagaacgaacgctggcggcgtggattaggcatgcaagtcgagcgagaatctgggagttcaagttttcggacgaggacttccggaggaaagcggcggaagggtgagtacaacatggacaatccatctccaagatgggcatagcctcccgaaaggggggataatgccgaatgtggcgagccggggcatcccggcggagctaaaggcggggaccgcaaggcctgccgcttggagccgggtccgtgcgctatcagcttgttggcggggtaacggcccaccaaggcgatgacggctagctggtctgagaggatggtcagccacactgggactgagatactgcccagactcctacgggaggctgcagtcgagaatcattcgcaatgggcggaagcctgacggtgcgacgtcgcgtggaggacggaggtcttcggattgtaaactccttttgtgagggataaacgtgtgcgaggcgaaca

SEQ ID NO: 9638 - DNA, 490 bp, unidentified
  misc_feature 1..490: note = Ascusbbf_682419, encodes 16S rRNA
  source 1..490: mol_type = genomic DNA
agagtttgatcatggctcaggatgaacgctagctacaggcttaacacatgcaagtcgaggggcagcatgaacttagcttgctaagtttgatggcgaccggcgcactggtgagtaacacgtatgcaacctgcctcctccagggggataacccagagaaatttggcctaataccccatagtccgcgagagggcatcctcttgcggggaaagccccggcgggaggagatgggcatgcggcgcattagcttgttggcggggcgacggcccaccaaggctacgatgcgtaggggttctgagaggaaggtcccccacactggtactgagacacggaccagactcctacgggaggcagcagtgaggaatattggtcaatgggcgaaagcctgaaccagccaagtagcgtgcaggacgacggccctatgggttgtaaactgcttttataggggaataaagttatccacgtgtggatatttgcatgtaccctatgaata

SEQ ID NO: 9639 - DNA, 488 bp, unidentified
  misc_feature 1..488: note = Ascusbbf_1287959, encodes 16S rRNA
  source 1..488: mol_type = genomic DNA
agagtttgatcctggctcagaacgaacgctggcggcaggcctaacacatgcaagttgaacgggatttaatctgtgcttgcacagattaatgagagtagcgcacgggtgagtaacacgtgggaacataccatgaagtgggggacaacagttggaaacgactgctaataccgcataatccctgagggggaaagatttatcgctttatgaatggcccgcggaagattaggtagttggtgaggtaatggcccaccaagcctacgatctatagctggtttgagaggatgatcagccacactggaactgagacacggtccagactcctacgggaggcagcagtgaggaatattgggcaatggggggaaccctgacccagccatgccgcgtgagtgaagaaggttttcggattgtaaagctctttcggatgtgacgatgatgacggtagcatctaaagaagccccggcaaacttcgtgccagcagccgcggtaat

SEQ ID NO: 9640 - DNA, 490 bp, unidentified
  misc_feature 1..490: note = Ascusbbf_695330, encodes 16S rRNA
  source 1..490: mol_type = genomic DNA
agagtttgatcctggctcaggatgaacgctggcggcgtgcctaacacatgcaagtcgaacgtgaagggtttttggactagcaataggccaaaggcttggaaagtggcgaacgggtgagtaacacgtggataacctgccgcgcagagggggataacgactggaaacggtcgctaataccgcatggtaccgagggatggggacattctttggttaaaactctggtgctgcgtgaggggtctgcgaccgattagctagttggtggggtaatggcctaccaaggcgatgatcggtagctagtctgagaggatgattagccacacgggaactgagacacggtcccgactcctacggggggcagcagtgaggaatattgcacaatggacgcaagtctgatgcagcaacgccgcgtggaggatgacggcccttgggttgtaaactccttttttcagggaagagaatggacggtacctgaagaataagtcacggctaa

SEQ ID NO: 9641 - DNA, 490 bp, unidentified
  misc_feature 1..490: note = Ascusbbf_1434728, encodes 16S rRNA
  source 1..490: mol_type = genomic DNA
agagtttgatcatggctcaggatgaacgctggcggcaggcttaacacatgcaagtcgaggggtaacgcggggtagcaatactctggcgacgaccgtcgcacgggtgcgtaacgcgtatgcaacctacctgtaccaggggtataacggagagaaatttccactcatcccccatatttttattctttcgcatgttaggataatgaaagcttcggtggttacgtatgggcatgcgttacattagctagttggtaaggtaacggcttaccaaggcgacgatgtctaggggagctgacaggcttatcccccaaactggtactgcgacacggaccagatgcctacgggaggcagcagtgaggaatattggtcaatggacggaagtctgaaccagccatgcagcgtggaggaagaaggtcctatgggttgtaaactccttttgttcgagagtaataagggctttgcgaagcccgatgagagtatcggacgaataagc

SEQ ID NO: 9642 - DNA, 488 bp, unidentified
  misc_feature 1..488: note = Ascusbbf_1372860, encodes 16S rRNA
  source 1..488: mol_type = genomic DNA
agagtttgatcctggctcagaacgaacgctggcggcaggcttaacacatgcaagttgagcgggattaattgatagcatgctattaattatgagagcagcgcactggtgagtaacacgtgggaacataccttttggtgggggacaacagttggaaacgactgctaataccgcataagccctaagggggaaagattaatggccgaacgattggcccgcggaagattaggtagtaggtggggtaacggcctacctagccgacgatctatagctggtctgagaggacgatcagccacattggaactgcgacacggaccagtgtcgtacagggggcagcagtgaggagtattaggcaatggaggcaactctggcccagccatgccgcgtgattgaagaaggttttcggatggtaaagctctttcggacgggaagatgatgacggtaccgtcagaagaagcaccggctaacttcgtgccagcagccgcggtaat

SEQ ID NO: 9643 - DNA, 490 bp, unidentified
  misc_feature 1..490: note = Ascusbbf_810979, encodes 16S rRNA
  source 1..490: mol_type = genomic DNA
agagtttgatcctggctcaggatcaacgctggcggcgtgcctaatgcatgcaagtcgagcggggtgatcttcggatcacttacgcggcggacgggtgcggaacacgtgggcaacctgccctgaggtgggggatagccggtggaaacaccgggtaattccgcatacggtcaacttccggagggaggttgaggaaagggtcttcggactcgccttgggaggggcctgcggccgattagctagacggtggggtaacggcctaccgtggcgatgatcggtagctggtctgagaggacggccagccacacggggactgagacacggaccaaactcctacgggaggcagcagtgaggaatattggtcaatgggcgaaagcctgaaccagccaagtagcgtgcaggacgacggccctatgggttgtaaactgcttttataggggaataaagttatccacgtatggatatttgcatgtaccctatgaataaggaccgg

SEQ ID NO: 9644 - DNA, 490 bp, unidentified
  misc_feature 1..490: note = Ascusbbf_1579471, encodes 16S rRNA
  source 1..490: mol_type = genomic DNA
agagtttgatcatggctcagaacgaacgctggcggcaggcttaacacatgcaagttgaacgggaacgataagatagcttgctattttattgcgagagtagcgcactggtgagtaacacgtgggaacatacctataggtgggggacaacagttggaaacgactgctaataccgcatacgccctaagggggaaagatttattgccgatagattggcccgcggaagattaggtagttggtggggtaacggcctaccaagccgacgatctatagctggtctgagaggacgatcagccacattggaactgagacacggtccagactcctacgggaggcagcagtgaggaatattgggcaatggaggaaactctgacccagccatgccgcgagagtgatgaaggttttcggattgtaaagctctttcggatgtgaagatgatgacggtagcatctaaagaagccccggcaaacttcgtgccagcagccgcggtaat

SEQ ID NO: 9645 - DNA, 490 bp, unidentified
  misc_feature 1..490: note = Ascusbbf_1020429, encodes 16S rRNA
  source 1..490: mol_type = genomic DNA
agagtttgatcctggctcaggatgaacgctggcggcgtgcctaacacatgcaagtcgaacgttagggtttagcaataaacccaaaagtggcgaacgggtgagtaacacgtggataacctgccgcgcagagggggataacgactggaaacggtcgctaataccgcatggtactaagaagtatggacgcttcttggttaaaactttggtgctgcgcgaggggtctgcgtccgattagctagttggtgaggtaatggctcaccaaggctgtgatcggtagctagtctgagaggatgattagccacacgggaactgagacacggtcccgactcctacggggggcagcagtgaggaatattgcacaatggacgcaagtctgatgcagcaacgccgcgtggaggatgacggtctttggattgtaaactccttttctcagggaagagaatggacggtacctgaggaataagtcacggctaactacgtgccagcagcc

SEQ ID NO: 9646 - DNA, 486 bp, unidentified
  misc_feature 1..486: note = Ascusbbf_1020652, encodes 16S rRNA
  source 1..486: mol_type = genomic DNA
agagtttgatcctggctcagaatcaatgctggcggcgcgcttaacacatgcaagtcgaacgagaaagttcccttcgggggatgagtacagtggcgtacgggtgagtaacacgtggattatctaccttctggtggggaataaccctgggaaaccggggctaataccgcataacctcgcaagagaaaagcagcaatgcgccggaagaggagttcgcggctgattagctagatggtgaggtaatggctcaccatggcgaagatcggtagccggcctgagagggcacacggccacactggcactgaaacacgggccagactcctacgggaggcagcagtggggaatcttgcacaatgggggaaaccctgatgcagcgacgccgcgtgagcgatgaagcctttcggggtgtaaagctctttcgacgggaacgattatgacggtacccgaagaagaagctgcggctaactacgtgccagcagccgcggtaat

SEQ ID NO: 9647 - DNA, 183 bp, unidentified
  misc_feature 1..183: note = Ascusbbf_380201, encodes 16S rRNA
  source 1..183: mol_type = genomic DNA
agagtttgatcctggctcagcggttaacgtacccagctagcatccacgaggacatgggtttgatccctggcctcgctcagtgggttaaggatctggcatttccatgagctgtggtgtaggttgcagacatggctcaggtcccatgttgctgtggctttggtgtaggccagcagccgcggtaat

SEQ ID NO: 9648 - DNA, 490 bp, unidentified
  misc_feature 1..490: note = Ascusbbf_882471, encodes 16S rRNA
  source 1..490: mol_type = genomic DNA
agagtttgatcctggctcagcctgaacgctggcggcgtggctaagacatgcaagtcgaacgaaacagtggcgaacgggtgagtaatgtgtcgctaacctgcctctggctcgaggatagcggagggaaacttccggtaatactcgatgtgtctccgttgtcgcatggcgacggatacaaagctttatgcggcctgggatggggcgacatggtatcagctagttggtgaggtaaaggctcaccaaggcttcgacgcctaaccggactgagaggtcggccggtcacatcgggactgagacactgcccggactcctacgggaggctgcagtaacgaatcttccgcaatgcacgaaagtgtgacggagcgacgccgcgtgcgggacgaagcccttcggggtgtaaaccgcttttacggggggataaagtgagtgacgtgtcattcattgcaggtaccccgcgaataaggaccggctaattccgtgccagcagccg

SEQ ID NO: 9649 - DNA, 490 bp, unidentified
  misc_feature 1..490: note = Ascusbbf_502671, encodes 16S rRNA
  source 1..490: mol_type = genomic DNA
agagtttgatcatggctcagaacgaacgctggcggcatgcctaacacatgcaagtcgaacgagaccttcgggtctagtggcgcacgggtgcgtaacgcgtgggaacctgcccttaggttcggaataactcctcgaaaggggtgctaataccggataatgtcttcggaccaaagatttatcgcctttggatgggcccgcgttggattagctagttggtgaggtaaaggctcaccaaggcgacgatccatagctggtcttagaggatgatcagccacactggaactgagacacggtccagactcctacgggaggcagcagtggggaatattggacaatggacgaaagcctgatccagccatgccgcgtgagtgaagaaggccttcgggttgtaaagctcttttgttgggaaagaaaagcaatcggttaatacccggttgttctgacggtacccaaagaataagcaccggctaacttcgtgccagcagccgcg

SEQ ID NO: 9650 - DNA, 490 bp, unidentified
  misc_feature 1..490: note = Ascusbbf_466811, encodes 16S rRNA
  source 1..490: mol_type = genomic DNA
agagtttgatcatggctcaggatgaacgctggcggcatgcctaatacatgcaagtcgaacggaagcagcaatgctttagtggcgaacgggtgagtaatatatagacaacctacctttaagacgaggatagcagttggaaacgattggtaatactggataggatacaagttcacatgaactaatatttaaaggggcaactgccccgcttgatgaggggtctatatcgcattagctagttggtagggtaacggcctaccaaggcgatgatgcgtagctgtgctgagaggcaaaacagccacattgggactgagacacggcccaaactcctacgggaggcagcagtagggaattttcggcaatgggggcaaccctgaccgagcaatgccgcgtgaatgatgaaggtcttcggatcgtaaagttctgttatcaggaaagaacgacatagagagtggaaagctctatgcatgacggtacctgattagaaagcccc

SEQ ID NO: 9651 - DNA, 490 bp, unidentified
  misc_feature 1..490: note = Ascusbbf_1782915, encodes 16S rRNA
  source 1..490: mol_type = genomic DNA
agagtttgatcatggctcaggatgaacgctggcggcgtgcctaacacatgcaagtcgaacgaagcatttcagatgaagttttcggatggattctgagatgactgagtggcggacgggtgagtaacacgtggataacctgcctcacactgggggacaacagttagaaatgactgctaataccgcataagcgcacagtgccgcatggtacagtgtgaaaaactccggtggtgtgagatggatccgcgtctgattagccagttggcggggtaacggcccaccaaagcgacgatcagtagccgacctgagagggtgaccggccacattgggactgagacacggcccagactcctacgggaggcagcagtgggggatattgcacaatggaggaaactctgatgcagcgacgccgcgtgggtgaagaagtatttcggtatgtaaagctctgttgcaagggaagaacggcacatagaggatatgtgagtgacggtac

SEQ ID NO: 9652 - DNA, 490 bp, unidentified
  misc_feature 1..490: note = Ascusbbf_1109801, encodes 16S rRNA
  source 1..490: mol_type = genomic DNA
agagtttgatcatggctcagaacgaacgctggcggcgtgcctaacacatgcaagtcgagcgcgaatggagcaatcctagtagagcggcgcacgggtgcgtaacacgtgggtaatctgcccaaaagtccgggataacctgccgaaaggctggctaataccgggtaagcctacggggtcttcggatcctgaaggaaaaggtggcctctgtatacaagctatcgcttttggatgagcccgcggcccatcagctagttggcggggtaatggcccaccaaggcaacgacgggtagctggtctgagaggacgatcagccacactgggactgagacacggcccagactcctacgggaggcagcagtggggaatattgcacaatgggcggaagcctgatgcagcgacgccgcgtgggggatgacggtcttcggattgtaaacccctttcagtagggacgaagcgcaagtgacggtacctgcagaagaagcaccggcta

SEQ ID NO: 9653 - DNA, 490 bp, unidentified
  misc_feature 1..490: note = Ascusbbf_877847, encodes 16S rRNA
  source 1..490: mol_type = genomic DNA
agagtttgatcatggctcaggatgaacgctggcggcgtgcttaacacatgcaagtcgaacggagatactatgtgagcggagatagcttgctattaacaatcttttagtatcttagtggcggacgggtgagtaacgcgtggataacctgccttgtactgggggataacacttagaaataggtgctaattccgcataagcgcacaggaccgcatggtctggtgtgaaaaactccggtggtacaagatggatccgcgtctgattagctagttggtaaggtaacggcctaccaaggcaacgatcagtagccggcttgagagagggaacggccacattgggactgagacacggcccaaactcctacgggaggcagcagtggggaatattgcacaatgggcgaaagcctgatgcagcgacgccgcgtgagtgaagaagtatttcggtacgtaaagctctatcagcaaggaagaaaatgacggtacttgactaagaa

SEQ ID NO: 9654 - DNA, 329 bp, unidentified
  misc_feature 1..329: note = Ascusbbf_966499, encodes 16S rRNA
  source 1..329: mol_type = genomic DNA
agagtttgatcctggctcaggatgaacgccggcggtgcattagctagttggtaaggtaacggcttaccaaggcgatgatgcatagccgagttgagagactgatcggccacaatggaactgagacacggtccatactcctacgggaggcagcagtagggaatcttccacaatgggcgcaagcctgatggagcaacaccgcgtgagtgaagaagggtttcggctcgtaaagctctgttgttggagaagaacgtgcgtgagagtaactgttcacgcagtgacggtatccaaccagaaagtcacggctaactacgtgccagcagccgcgtaat

SEQ ID NO: 9655 - DNA, 490 bp, unidentified
  misc_feature 1..490: note = Ascusbbf_1612781, encodes 16S rRNA
  source 1..490: mol_type = genomic DNA
agagtttgatcctggctcaggatgaacgctggcggcgtgcctaacacatgcaagtcgaacgagtgaggtatgaaacctagtgattaccgagcgagtggcggacgggtgagtaacgcgtgggtaacctgccttacagagggggataacagtttgaaaagactgctaataccgcataagcacacagtaccgcatggtacagggtgaaaagatttatcactgtaagatggacccgcgtctgattaggtagtaggcggggcaacggcccacctagccgacgatcagtaggggttctgagaggaaggtcccccacattggaactgagacacggtacaaactcctacgggaggcagcagtgaggaatattggtcaatgggcgggagcctgaaccagccaagtagcgtgcaggatgacggccctatgggttgtaaactgcttttatcaggggataaagtgacccacgtgtggatatttgcatgtaccctatgaataa

SEQ ID NO: 9656 - DNA, 490 bp, unidentified
  misc_feature 1..490: note = Ascusbbf_636341, encodes 16S rRNA
  source 1..490: mol_type = genomic DNA
agagtttgatcctggctcaggacgaacgctggcggcgtgcctaacacatgcaagtcgaacggggtacttaggagcaaggcttcggccgagcgaataagttacctagtggcggacgggtgagtaacgcgtgagcaacctaccttcaagagggggataacgactggaaacggtcgctaataccgcataaaatccagtggaagcatttttattggatcaaaggagcaatccgcttgaagatgggctcgcgtctgattagctagtaggtgaggtaatggctcacctaggcgacgatcagtagccgaactgagaggttgatcggccacattgggactgagatacggcccagactcctacgggaagcagcagtgggggatattgcgcaatgggggaaaccctgacgcagcaacgccgcgtgaaggaagaaggccttcgggttgtaaacttctgtcttatgggaagaaacaaatgacggtaccataggaggaagctc

SEQ ID NO: 9657 - DNA, 490 bp, unidentified
  misc_feature 1..490: note = Ascusbbf_1372252, encodes 16S rRNA
  source 1..490: mol_type = genomic DNA
agagtttgatcctggctcaggatgaacgctagcggcaggcttaacacatgcaagtcgaggggtaacgcggggtagcaatactctggcgacgaccggcgcacgggtgcgtaacgcgtatgcaacctacctgtaacaggggtataacggagaggaatttccactaatcccccatattgttattctttcgcatgttaggataacgaaagcttcggtggttacgtattggcatgcgtgacagtagctagttggtaaggtaacgacttaccaaggcgacgatgtctaggggagctgagaggcttatccccgacactggtactgagaaacgggcaggactcctccgggaggcagcagtcgggaatattgcgaaatggaggaaactctgacgcagtgacgccgcgtgcaggaagaaggtgttcggattgtaaactgctttagacagggaagaaaaaagacagtacctgtagaataagctccggctaactacgtgcca

SEQ ID NO: 9658 - DNA, 490 bp, unidentified
  misc_feature 1..490: note = Ascusbbf_537332, encodes 16S rRNA
  source 1..490: mol_type = genomic DNA
agagtttgatcctggctcaggacgaacgctggcggcgtgcttaacacatgcaagtcgagcggggacaaacggggtgcttgcaccctgattgttctggcggcggacgggtgagtaacgcgtgagcaatctgtcccagacagggggataacacttggaaacaggtgctaataccgcataagaccacgaggtcgcatggccttgaggtaaaaggaggaatccggtttggggtgagctcgcgtctgattagctagttggtggggtaaaggctcaccaaggcaacgatcagtagccgacctgagagggtgatcggccacactgggactgagacacggcccagactcctacgggaggcagcagtggggaatattggacaatggggggaaccctgatccagcaacgccgcgtgagggaagaaggttctcggattgtaaacctctgtcctcagggaagaaaaaaatgacggtacctgaggaggaagccccggctaact

SEQ ID NO: 9659 - DNA, 490 bp, unidentified
  misc_feature 1..490: note = Ascusbbf_1680394, encodes 16S rRNA
  source 1..490: mol_type = genomic DNA
agagtttgatcatggctcaggacgaacgctggcggcgtgcttcatacatgcaagtcgaacgagaagctgacttcggtcagtggaaagtggcggacgggtgagtaatatgtaggaaatctgccctagagagggggacaacagagggaaacttctgctaataccccatatgagcttagttgaaatactaatcttgaaaactccggtgctctgggatgagcctgcatctgattagctagttggtggtgtaatggaccaccaaggcgacgatcagtagctggtttgagaggatgatcagccacaatgggactgagacacggcccatactcctacgggaggcagcagtagggaattttgcgcaatgggcgaaaggctgaagcagcaacgccgcgtggaggatgaaggcatatttgttgtaaactcctgtaagtggggaaaaattggtctgtttacagactttgattgtacccacagagtaagccccggctaacta

SEQ ID NO: 9660 - DNA, 490 bp, unidentified
  misc_feature 1..490: note = Ascusbbf_827153, encodes 16S rRNA
  source 1..490: mol_type = genomic DNA
agagtttgacatggctcaggacgaacgctggcggcgtgcctaaaacatgcaagtcgaacggagcaccccggacagagacttcggtcaatagaagggaatgcttagtggcggacgggtgagtaacgcgtgagcaacctgcctcaaagagggggacaacagttggaaacgactgctaataccgcataaagcaagagtaccgcatggtgcatttgccaaagatttatcgctttgagatgggctcgcgtctgattagatagttggtggggtaacggcccaccaagtcgacgatcagtagccggactgagaggttgtacggccacattgggactgagatacggcccagactcctacgggaggcagcagttgggaatattgcgcaatggggggaaccctgacgcagcaacgccgcgtgaaggaagacggttttcggattgtaaacttcttttattgaggacgaaacaaatgacggtactcaatgaataagctccgg

SEQ ID NO: 9661 - DNA, 490 bp, unidentified
  misc_feature 1..490: note = Ascusbbf_1288193, encodes 16S rRNA
  source 1..490: mol_type = genomic DNA
agagtttgatcctggctcaggatgaacgctagcggcaggcctaatacatgcaagtcgaacggcagcgggtccagcaatggatgccggcgagtggcgcacgggtgcgtaacacgtatgcaatctacctgtaacttagggatagcccggagaaattcggattaatacctaatgataaccgagactggcatcagtttttgtttaaagatttatcggttacagatgagcatgcgtctgattagttagttggtgaggtaacggctcaccaagacgatgatcagtaggggacctgagagggcgatcccccacactggtactgagatacggacctgactcctacgggaggcagcagtagggaatattgggcaatggtcgagagactgacccagccatgccgcgtgcaggatgaaggccttatgggttgtaaactgcttttgatcgggaacaaagaggccatgcgtggcaagatgagtgtaccgatagaataagcacc

SEQ ID NO: 9662 - DNA, 490 bp, unidentified
  misc_feature 1..490: note = Ascusbbf_1498158, encodes 16S rRNA
  source 1..490: mol_type = genomic DNA
agagtttgatcctggctcagaacgaacgctggcggcatggattaggcatgcaagtcgaacgaggcagcaatgccgagtggcggaagggtgaggaacgcgtgagcaatctgccctccagttgggaataacagttggaaacgactgctaataccgaatgtggctcatcggtcgcatgactgacgggctaaagatttatcgctggaggatgagctcgcgtcccattagctagttggtgaggtaacggcccaccgagccatcgatcagtaggggttctgagaggaaggtcccccacattggtactgagacacggaccaaactcctacgggaggcagcagtgaggaatattggtcaatgggcgagagcctgaaccagccaagtagcgtgcaggatgactgccctatgggttgtaaactgcttttataggggaataaagtgaggtacgtgtacctttttgtatgtaccctatgaataaggaccggctaattccgtg

SEQ ID NO: 9663 - DNA, 490 bp, unidentified
  misc_feature 1..490: note = Ascusbbf_453735, encodes 16S rRNA
  source 1..490: mol_type = genomic DNA
agagtttgatcatggctcaggatgaacgctggcggcgtgcctaacacatgcaagtcgagcggaattaataatgcttgcactaataatttagcggcggacgggtgagtaacacgtggataacctgccctatacaggaggataacaatgagaaatcattgctaatactgcataagcttactgatacgcatgtaagagtaagaaaaagtgtaaactggtataggaggggtccgcgtctgattagctagttggagaggtaaaggctcaccaaggcgacgatcagtagccggcctgagagggtggacggccacattgggactgagacacggcccaaactcctacgggaggcagcagtggggaatattgcacaatggggggaaccctgatgcagcaacgccgcgtgaaggaagaaggttttcggatcgtaaacttctatcgacggggaagaaaataatgacggtacccgagtaagaagccccggctaactacgtgc

SEQ ID NO: 9664 - DNA, 490 bp, unidentified
  misc_feature 1..490: note = Ascusbbf_1901888, encodes 16S rRNA
  source 1..490: mol_type = genomic DNA
agagtttgatcatggctcagattgaacgctggcggcatgcttaacacatgcaagtcgaacggtagcatattctagcttgctagaagggtgacgagtggcgaacgggtgagtaacgcgtaggaatgtgccttaaagagggggataacctggggaaactcaggctaataccgcataatctctgtggagaaaagctagggaccttcgggcctggtgctttaagaacagcctgcgtccgattagctagttggtggggtaaaggcctaccaaggcgacgatcggtagctggtctgagaggatgatcagccacactggaactgagacacggtccagactcctacgggaggcagcagtggggaatattggacaatgggggcaaccctgatccagcaatgccgcgtgtgtgaagaaggcctgagggttgtaaagcactttcagtggggaggaggattgctaggttaagagctaagtaattggacgttacccacagaag

SEQ ID NO: 9665 - DNA, 490 bp, unidentified
  misc_feature 1..490: note = Ascusbbf_453001, encodes 16S rRNA
  source 1..490: mol_type = genomic DNA
agagtttgatcctggctcaggacgaacgctggcggcgtgcttaacacatgcaagtcatggggacccagcaatgggtaaccggcgaacgggtgcgtaacacgtgagtgacctgccgatttgtgggggatagccgggccaacgcccgggtaataccgcatacgctcttcttggggcatctctagaagaggaaacctccggggcaaatcgagggactcgcggcctatcagctagttggcgaggtaacggctcaccaaggctacgacgggtagctggtctgagaggatggccagccacattgggactgagatacggcccagactcctacgggaggcagcagtggggaatattgcgcaatggcctaacggctgacgcagcgacgccgcgtgtgggatgacgcccttcggggtgtaaaccactgttgctcgagacgaatagcgagctttagctcgcctgacggtatcgagtgaggaagcaccggctaactccgtgc

SEQ ID NO: 9666 - DNA, 490 bp, unidentified
  misc_feature 1..490: note = Ascusbbf_1178040, encodes 16S rRNA
  source 1..490: mol_type = genomic DNA
agagtttgatcatggctcaggatgaacgctagctacaggcttaacacatgcaagtcgaggggtaacgatattgaaagcttgctttcgataggcgacaaccggcgcacgggtgagtaacgcgtatccaacctgcccataactaagggataatccgtagaaatgcggtctaataccttatgtgttccgacgaggacatctgaattggaataaagattgatcgcctcgggatggggatgcgtaggattaggcaggcggcggggtaacggcccaccgcgccgacgatccttaggggttctgagaggagggtcccccacactggtactgagacacggaccagactcctacgggaggcagcagtgaggaatattggtcaatgggcgagagcctgaaccagccaagtagcgtgcaggatgacggccctatgggttgtaaactgcttttgtacggggataaagtgagtcacgtgtggcttattgcaggtaccgtacgt

SEQ ID NO: 9667 - DNA, 490 bp, unidentified
  misc_feature 1..490: note = Ascusbbf_803983, encodes 16S rRNA
  source 1..490: mol_type = genomic DNA
agagtttgatcctggctcaggattaacgctggcggcatgcctaatacatgcaagtcgaatgcctgtagcaatacagaaacatggcgaacgggtgagtaatacataagtaacctaccctgatgatggggataacacctagaaatgggtgctaataccgaataatccagtttgtaaagaattacagatagggaaaggatcgcaagatcgcattaggatgggcttgtgacgcattagctagttggtggggtaaaggcctaccaaggcaacgatgcgtagccgacctgagagggtgaacggccacactggaactgagacacggtccagactcttacgggaggcagcagtagggaattttcggcaatgggcgaaagcctgaccgagcaatgccgcgtgaacgaagaaggtcttcggattgtaaagttcttttacaagggaagaaaaggctcaatggacttgagcaattgacggtaccttgagaataagccacggc

SEQ ID NO: 9668 - DNA, 490 bp, unidentified
  misc_feature 1..490: note = Ascusbbf_1547377, encodes 16S rRNA
  source 1..490: mol_type = genomic DNA
agagtttgatcatggctcaggatgaacgctagcgacaggcttaacacatgcaagtcgaggggcagcatgaaattacttcggtaattttgatggcgaccggcgcacgggtgcgtaacgcgtatgcaacctacccataactcttggatagcccatggaaacgtggattaatacaggatagtctaatgaatctgcatggattttttagtaaagaatttcggttatggatggacatgcgttccattaggtagtaggtgaggtaacggctcacctagcccatgatggataggggttctgagaggaaggtcccccacattggaactgagacacggtccaaactcctacgggaggcagcagtgaggaatattggtcaatggccgaaaggctgaaccagccaggtcgcgtgagggatgactgccctatgggttgtaaacctcttttgtttgggaagaataagctttacgtgtaaagcgatgccggtaccaaacgaata

SEQ ID NO: 9669 - DNA, 490 bp, unidentified
  misc_feature 1..490: note = Ascusbbf_976163, encodes 16S rRNA
  source 1..490: mol_type = genomic DNA
agagtttgatcctggctcagaatgaacgctggcggcgtgccttacacatgcaagtcgagcgaggcggggagcaatccccagtcgagcggcgaacgggtgagtaacgcgtggataacctgcctctgagtgggggataacccggggaaactcgggctaataccgcataacattgagagatcaaagggggctcgcaagggctctcgcttggagaggggtccgcgtccgattagctagttggtgaggtaatggctcaccaaggcgacgatcggtagccggcctgagagggtgatcggccacactggaactgagacacggtccagactcctacgggaggcagcagtggggaattttgcgcaatgggcggaagcctgacgcagcaacgccgcgtggaggatgaaggtctttggattgtaaactcctgtcagcagggacgaaggctcctggtttaatacaccaggggattgactgtacctgcagaggaagccccggc

SEQ ID NO: 9670 - DNA, 490 bp, unidentified
  misc_feature 1..490: note = Ascusbbf_975737, encodes 16S rRNA
  source 1..490: mol_type = genomic DNA
agagtttgatcctggctcagattgaacgctggcggcacgcttaacacatgcaagtcgaacggttgttagtagcttgctactgacgatagtggcgtacgggtgagtaacgcgtaggaatctgccctacagactgggataacctagggaaacttaggctaatactggatgagttctgaggaagaaagtatttatacgagagtataagtagctgtaggatgagcctgcgttggattagctagttggttaggtaaaggctgaccaaggcgaagatccatagctgttctgagaggaagaccagccacactgggactgagacacggcccagactcctacgggaggcagcagtggggaatattggacaatgggggcaaccctgatccagcgatgccgcgtgtgtgaagaaggcctgcgggttgtaaagcactttagttggggaggagactctgcgcgagcggagtagacgttacccaaagaataagcaccggctaac

SEQ ID NO: 9671 - DNA, 490 bp, unidentified
  misc_feature 1..490: note = Ascusbbf_684869, encodes 16S rRNA
  source 1..490: mol_type = genomic DNA
agagtttgatcatggctcaggacgaacgctggcggcgtgcctaacacatgcaagtcgaacgaggtccatccagtggcaacactggtgaagaccgagtggcgaacgggtgagtaacacgtgaggaacctgccccgatctcaggaataacaggtggaaacacctgctaataccggatgccttcaccgcaccgcatgacgtggtgaagaaaggtttaccggatcgggagggcctcgcggcctatcagctagttggtggggtaacggcctaccaaggctccgacgggtagctggtctgagaggacgatcagccacactgggactgagacacggcccagactcctacgggaggcagcagtggggaatcttgcgcaatgggcgaaagcctgacgcagcaacgccgcgtgggggatgaaggccctcgggttgtaaacccctttcagcagggacgaatctgacggtacctgcagaagaaggtccggctaactacgtgc

SEQ ID NO: 9672 - DNA, 490 bp, unidentified
  misc_feature 1..490: note = Ascusbbf_1139853, encodes 16S rRNA
  source 1..490: mol_type = genomic DNA
agagtttgatcatggctcaggacgaacgctggcggcgtgcttaacacatgcaagtcgaacgaagcaactaagagtgcttgcacaaatagttgactgagtggcggacgggtgagtaacgcgtgagcgacctaccttaaagagggggacaacagttggaaacgactgctaataccgcataagaccacaatgctgcatggcaaaggggtcaaaggagcaatccgctttaagatgggctcgcgtcccattaggtagttggtgaggtaacggctcaccaagccgacgatgggtagccgacctgagagggtgatcggccacactggaactgagacacggtccagactcctacgggaggcagcagtggggaatattgggcaatgggcgaaagcctgacccagcaacgccgcgtgaaggaagaaggtcttcggattgtaaacttctgtcctatgggaagaaaaaaatgactgtaccataggaggaagctccggctaac

SEQ ID NO: 9673 - DNA, 490 bp, unidentified
  misc_feature 1..490: note = Ascusbbf_419608, encodes 16S rRNA
  source 1..490: mol_type = genomic DNA
agatttgatcctggctcaggacgaacgctggcggcgtgcttaacacatgcaagtcgaacgatgaagcccagcttgctgggtggattagtggcgaacgggtgagtaacacgtgggtgatctgccctgcactctgggataagcctgggaaactgggtctaataccggatatgacctcgggatgcatgttctggggtggaaagtttttcggtgcaggatgagcccgcggcctatcagcttgttggtggggtaatggcctaccaaggcgacgacgggtagccggcctgagagggcgaccggccacactgggactgagacacggtccaaactcctacgggaggcagcagtgaggaatattggtcaatggacgagagtctgaaccagccaagtagcgtgcaggatgacggccctatgggttgtaaactgcttttatgcggggataaagtgcgccacgcgtggtgtattgcaggtaccgcaagaataaggaccggct

SEQ ID NO: 9674 - DNA, 490 bp, unidentified
  misc_feature 1..490: note = Ascusbbf_315594, encodes 16S rRNA
  source 1..490: mol_type = genomic DNA
gagtttgatcatggctcagaatgaacgttggcggcatggattaggcatgcaagtcgagcgagaagagtcatttgcttgcatttgactcggaaagcggcgtaagggtgagtaacacgtagttacctgcctccgggtccggaatagccacgggaaactgtgggtaatgccggataacatctcaggatcaaaggtgagattccgcccggagaggggactgcgtcctactagcttgttggtggggtaatggcctaccaaggcttcgatgggtagcgggcgtgagagcgtggcccgtcacagtgggactgagacacggcccagactcctacgggaggcagcagtgaggaatattggtcaatggcggcaacgctgaaccagccaagtagtgtgagggattactgccctatgggttttaaacctcttttgttggggagcaaccggcatcacttgtggtgccctgcgagtacccttcgaataagcatcggctaactcc

SEQ ID NO: 9675 - DNA, 488 bp, unidentified
  misc_feature 1..488: note = Ascusbbf_1766874, encodes 16S rRNA
  source 1..488: mol_type = genomic DNA
agagtttgatcctggctcaggacgaacgctggcggcgtgcttaacacatgcaagtcgaacgaggtagcaatacctagtggcggacgggtgagtaacacgtaggtaacctgcctcatagtgggggatacccagccgaaaggttggctaataccgcataagctctgcagttggaatactgcagaggaaagatttattgctatgagaggggcctgcgcatgattagctagttggtggggtaatggctcaccaaggcgacgatcattagctggtctgagaggacgatcagccacactggaactgagacacggtccagactcctacgggaggcagcagtggggaattttccgcaatgggcgaaagcctgacggagcaacgccgcgtgggtgatgaagatcttcggatcgtaaagccctttcagcagggacgaagcgagtgacggtacctgcagaagaagcatcggctaactacgtgccagcagccgcggtaat

SEQ ID NO: 9676 - DNA, 490 bp, unidentified
  misc_feature 1..490: note = Ascusbbf_989587, encodes 16S rRNA
  source 1..490: mol_type = genomic DNA
agagtttgatcctggctcaggacgaacgctggcggcgtgcttaacacatgcaagtcgagcggaaaggctcctttcggggggtactcgagcggcgaacgggtgagtaacacgtgagtaacctgtccttggctttgggataaccctcggaaacgggggctaataccggatatgactgctgcctgcatgggtggtggtggaaaggtttgttccggccagggttgggctcgcggcctatcagcttgttggtggggtgatggcctaccaaggcggcgacgggtagccggcctgagagggcgaccagccacactgggactgagacacggcccagactcctacgggaggcagcagtggggaatattgcacaatgggcgaaagcctgatgcagcgacgccgcgtgagggatgacggccttcgggttgtaaacctctttcagcaccgacgaagcggaagtgacggtaggtgcagaagaagcgccggccaactacgtgcc

SEQ ID NO: 9677 - DNA, 490 bp, unidentified
  misc_feature 1..490: note = Ascusbbf_1372517, encodes 16S rRNA
  source 1..490: mol_type = genomic DNA
agagttttctcctttctccttcttccctctttcttcttgcttcccccctgccagtcgaacggagttatctcgctgaggagagcttgctcaaatcttgagataacttagtggcggacgggtgggtaacgcgtggataacctgccttataccgggggataacacttagaaataggtgctaataccgcataagcgcacgatcccgcatgggaaagtgtgaaaaactcctgtggtataagatggatccgcgtctgtttagatagttggtgaggtaacggcccaccaagtcaacgatcagtcgccggcctgggcgggtgaacggccacatagggactgagacacggccaaaactcctacgggcggaagcagtggggaatattgcacaatgggggaaaacctgatgcagcgacgccgcgtgagtgaagaagtatttcggtatgtaaagctctatcagcaaggaagaaaaaaatgacggtacttgactaagaagccc

SEQ ID NO: 9678 - DNA, 490 bp, unidentified
  misc_feature 1..490: note = Ascusbbf_1298638, encodes 16S rRNA
  source 1..490: mol_type = genomic DNA
agagtttgatcctggctcaggatgaacgctggcggcgtgcttaacacatgcaagtcgaacgaagcatttcagtgaatttcttcggattgaagctgatctgactgagtggcggacgggtgagtaacgcgtgggtaacctgccttacacagggggacaacagagggaaacttctgctaataccgcataacccgctaatgtcgcatgacatagacggaaaagatttatcggtgtaagatggacccgcgtctgattagccagttggtggggtaacggcctaccaaagcgacgatcagtagccgaactgagaggttgaccggccacattgggactgagacacggcccagactcctacgggaggcagcagtggggaatattgcacaatgggggaaaccctgatgcagcaacgccgcatgagtgaagaagtatttcggtatgtaaagctctatcagcagggaagagattgacggtacctgactaagaagccccggct

SEQ ID NO: 9679 - DNA, 490 bp, unidentified
  misc_feature 1..490: note = Ascusbbf_1585472, encodes 16S rRNA
  source 1..490: mol_type = genomic DNA
agagtttgatctggctcaggatgaacgctggcggcgtgcataacacattcaagtcgaacggtgaagtcccttcggggacggatcagtggcggacgggtgagtaacgcgtgagcaacctgcctcatactcagggataacacagggaaacttgtgctaataccggataacgtattgggactgcatggttctgatatcaaagctccggtggtgtgagatggactcgcgtatgattagatagttggcagggtaacggcctaccaagtctgcgatcattagccgaactgagaggttgaacggccacattggaactgagaaacggtccagactcctacgggaggcagcagtggggaatattgggcaatgggcgaaagcctgacccagcgacgccgcgtgcgggaagacggtcttcggattgtaaaccgctttcagcagggaagaagcaagtgacggtacctgcagaagaagtcacggctaactacgtgccagcagc

SEQ ID NO: 9680 - DNA, 490 bp, unidentified
  misc_feature 1..490: note = Ascusbbf_899980, encodes 16S rRNA
  source 1..490: mol_type = genomic DNA
agagttgatcatggctcaggacgaacgctggcggcgtgcttaacacatgcaagtcgaacggggatatccgtgcggaaggcttcggccggaagggtggatattcgagtggcggacgggtgagtaacgcgtgaacaatctgtcccggacagggggataacacttggaaacaggtgctaataccgcataagaccacagcatcgcatggtgcgggggtaaaaggggaaacgcggttcggggtgagttcgcgtccgattagatagttggtgaggtaacggcccaccaagtcgacgatcggtagccggactgagaggtcgatcggccacattgggactgagacacggcccagactcctacgggaggcagcagtgggggatattgcacaatgggcgcaagcctgatgcagcaacgccgcgtgagggaggacggtcttcggattgtaaacctctgtccttggggaagaaacaaatgacggtacccttggaggaagcca

SEQ ID NO: 9681 - DNA, 488 bp, unidentified
  misc_feature 1..488: note = Ascusbbf_1537254, encodes 16S rRNA
  source 1..488: mol_type = genomic DNA
agagtttgatcctggctcagaacgaacgctggcggcaggcttaacacatgcaagtcgaacgccccgcaaggggagtggcagacgggtgagtaacgcgtgggaatctacctagttctacggaacaacagttggaaacgactgctaataccgtatacgccctacgggggaaagatttgtcggaattagatgagcccgcgtgagattagctagttggtggggtaatggcctaccaaggcgacgatctctagctggtctgagaggatgatcagccacactgggactgagacacggcccagactcctacgggaggcagcagtgaggaatattggtcaatggaggcaactctgaaccagccaagtagcgtgcaggacgacggccctacgggttgtaaactgcttttatgcggggataaacggcattacgtgtagtgctttgcaggtaccgcatgaataaggaccggctaattccgtgccagcagccgcggtaat

SEQ ID NO: 9682 - DNA, 490 bp, unidentified
  misc_feature 1..490: note = Ascusbbf_758650, encodes 16S rRNA
  source 1..490: mol_type = genomic DNA
agagtttgatcatggctcagattgaacgctggcggcaggcctaacacatgcaagtcgagcgcgaaaggttcttcggagctgagtagagcggcggacgggtgagtaatgcgtaggaatctacctggtagtgggggataacttggggaaactcaagctaataccgcatacgccccatgggggaaagcgggggatcttcggacctcgtgctatcggaagagcctgcgtaggattagcttgttggtgaggtaatggctcaccaaggcgacgatccttagctggtctgagaggatgatcagccacaccgggactgagacacggcccggactcctacgggaggcagcagtggggaatattgcgcaatgggggaaaccctgacgcagccatgccgcgtgtgtgaagaaggccttcgggttgtaaagcacttttgcattcgaggaagacagcacgtaaataaacgtgttatttgacgttagagtgtgaataagcaccg

SEQ ID NO: 9683 - DNA, 490 bp, unidentified
  misc_feature 1..490: note = Ascusbbf_372858, encodes 16S rRNA
  source 1..490: mol_type = genomic DNA
agagtttgatcatggctcagattgaacgctggcggcacgcctaacacatgcaagtcgagcggtaacatggttggagcttgcttcaactgatgacgagcggcggacgggtgaggaacacgtaggaacctgcctagaagagggggacaaccagaggaaactttggctaataccgcataaactcgcgagagaaaagtcgccttagggtggcgcttttagaagggcctgcgtccgattagttagttggtgaggtaactgctcaccaaggcgatgatcggtaactggtctgagaggacggccagtcacactgggactgagacacggcccagactcctacgggaggcagcagtggggaatattggacaatgggggcaaccctgatccagcgatgccgcgtgggtgaagaaggccttcgggttgtaaagccctttaggttgggaagaaaggtagccgtttaagagatagttactgtgacggtaccaacagaataagc

SEQ ID NO: 9684 - DNA, 490 bp, unidentified
  misc_feature 1..490: note = Ascusbbf_596997, encodes 16S rRNA
  source 1..490: mol_type = genomic DNA
agagtttgatcctggctcaggatgaacgctagcggcaggcttaacacatgcaagtcgaggggcagcgcggggtagcaatactctggcggcgaccggcggaagggtgcgtaacgcgtgagcaacttgcccgtcactggaggataggcactggaaacggtgtgtaatactccataacataagaattcgcatgagtttttattgaaagattcattggtgacggatgggctcgcgagacattagctagacggcggggtaacggcccaccgtggcgatgattggtaggggttctgagaggaaggtcccccacattggaactgagacacggtccaaactcctacgggaggcagcagtgaggaatattggtcaatggccgtaaggctgaaccagccaagtagcgtgcaggatgacggccctatgggttgtaaactgcttttgtatgggaataaagtgcgggacgtgtcccgttttgtatgtaccataagaataagga

SEQ ID NO: 9685 - DNA, 489 bp, unidentified
  misc_feature 1..489: note = Ascusbbf_428733, encodes 16S rRNA
  source 1..489: mol_type = genomic DNA
agagtttgatcatggctcagaacgaacgctggcggcaggcttaacacatgcaagttgaacggtattgttaagtagcttgctatttgacaagagagtagcgcactggtgagtaacacgtgggaacgtgccttttagtgggggacaacagttggaaacgactgctaataccgcatacgccctaagggggaaagatttatcgctaaaagatcggcccgcggaagattaggtagtaggtggggtaaaggcctacctagccgacgatctatagctggtctgagaggacgatcagccgcattggaactgagacacggtccagactcctacgggaggcagcagtgaggaatattgcacaatggacgaaagtctgatgcagcaacgccgcgtggaggatgacggcccttgggttgtaaactccttttttcagggaagagtgaggacggtacctgaagaataagtcacggctaactacgtgccagcagccgcggtaat

SEQ ID NO: 9686 - DNA, 490 bp, unidentified
  misc_feature 1..490: note = Ascusbbf_666555, encodes 16S rRNA
  source 1..490: mol_type = genomic DNA
agagtttgatcatggctcaggacgaacgctggcggcgtgcttaacacatgcaagtcgaacggtgaaggtggagcttgctctgctggatcagtggcgaacgggtgagtaacacgtgagtaacctgcccctcacttcgggataacctcgggaaatcgtggctaataccggatacgaggcaccttcgcatggggtgtgcctggaaagatttatcggtgggggatggactcacggcctatcagcttgttggtggggtaatggcccaccaaggcgacgacgggtagccggcctgagagggcgaccggccacactgggactgagatacggcccagactcctacgggaggcagcagtgggggatattgcacaatggaggaaactctgatgcagcgatgccgcgtgagtgaagaagtatttcggtatgtaaagctctatcagcagggaagataatgacagtacctgactaagaagccccggctaactacgtgccagca

SEQ ID NO: 9687 - DNA, 490 bp, unidentified
  misc_feature 1..490: note = Ascusbbf_600065, encodes 16S rRNA
  source 1..490: mol_type = genomic DNA
agagtttgatcctggctcaggacgaacgctggcggcgtgcttaacacatgcaagtcgaacgagaatctgtggatcgaggattcgcccaagtgaagcagaggatagtggcggacgggtgagtaacgcgtgaggaacctgcctttcagagggggacaacagttggaaacgactgctaataccgcatgatacatttgggtggcatcatctgaatgtcaaagatttatcgctgaaagatggcctcgcgtctgattagctagttggtaaggtaacggcttaccaaggcgatgatcagtagccggcctgagagggtgatcggccacattgggactgagacacggcccaaactcctacgggaggcagcagtggggaatattgcacaatggaggaaactctgatgcagcgacgccgcgtgagcgaagaagggattcgtctcgtaaagctctgtcctatgggaagataatgacggtaccatagaagaaagccccggcta

SEQ ID NO: 9688 - DNA, 490 bp, unidentified
  misc_feature 1..490: note = Ascusbbf_1603353, encodes 16S rRNA
  source 1..490: mol_type = genomic DNA
agagtttgatcctggctcagaacgaacgctggcggcgcgtcttaagcatgcaagtcgagcgggatgaagtggcttgccacttctgagagcggcggactggcgaggaacgcgtgggcgacgcgccctcgggaccgggacagcccgtggaaacacggggtaataccggatggaatgggaggcttggaggccttccatcaaaggggcttcggccccgccggaggagcggcccgcgacccatcagctagttggcggtgcaagggaccaccaaggctgcgacgggtatccggcctgagagggcgaacggacgcattgggactgagatacggcccagactcctacgggaggcagcagtcgggaatattgcgcaatggaggaaactctgacgcagtgacgccgcgtgcaggaagaaggttttcgaattgtaaactgctttagacagggacgaaaaaaatgacggtacctgtagaataagctccggctaactacgtgc

SEQ ID NO: 9689 - DNA, 490 bp, unidentified
  misc_feature 1..490: note = Ascusbbf_1377302, encodes 16S rRNA
  source 1..490: mol_type = genomic DNA
agagtttgatcatggctcaggatgaacgctagcggcaggcttaatacatgcaagtcgagggggattaacattgtagcaatacgaagttatgagaccggcaaacgggtgaggaacacgtacgcaactttcccaaaactggtgaatagccctccgaaaggaggattaatacaccgtaacatcccgacacggcatcgtgctgggattatagctccggcggttttggatggtcgtgcgcctgattaggtagttggcggggtaacggcccaccaagcctgcgatcagtaactggtgtgagagcacgaccagtcagacgggaactagaacacgggcccgactcctacgggatgcagcagtaaggaatattggtcaatggacgaaagtctgaaccagccatgccgcgtgaaggattaaggccctctgggttgtaaacttcttttatctgggacgaaaaaagggtattcttacccacttgacggtaccagaggaataa

SEQ ID NO: 9690 - DNA, 477 bp, unidentified
  misc_feature 1..477: note = Ascusbbf_1338568, encodes 16S rRNA
  source 1..477: mol_type = genomic DNA
agagtttgatcatggctcaggatgaacgctagctacaggcttaacacatgcaagtcgaggggcagcatgaagtttgcttgcaaactttgatggcgaccggcgcacgggtgagtaacgcgtatccaaccttccccttagtagggcatagcccggcgaaagtcggattaataccctatgttttccaatgaggacatctgagctggaacaaagattcatcgctaagggatggggatgcaggggttctgagaggaaggtcccccacattggaactgagacacggtccaaactcctacgggaggcagcagtgaggaatattggtcaatgggcgagagcctgaaccagccaagtagcgtgcaggatgacggccctatgggttgtaaactgcttttatacggggataaagtgagggacgtgtccctttttgtaggtaccgtatgaataaggaccggctaattccgtgccagcagccgcggtaat

SEQ ID NO: 9691 - DNA, 472 bp, unidentified
  misc_feature 1..472: note = Ascusbbf_1409457, encodes 16S rRNA
  source 1..472: mol_type = genomic DNA
agagtttgatcatggctcagagcgaacattggcggtaggcttaacacatgcaagtcgagcgaggcgtaatagtcgagcggcgaacgggtgagtaatacatggaaatctaccctgaagtggggataacgtccagaaatggacgctaataccgcataatccatattgggaaagcgttgcagcgctttaggatgagtccatggctgattagcttgttggtgaggtaatggctcaccaaggcgacgatcagtagccggactgagaggttgaacggccacattgggactgagatacggcccagactcctacgggaggcagcagtggggaatattgggcaatgggcgcaagcctgacccagcaacgccgcgtgaaggaagaaggctttcgggttgtaaacttcttttaagggggaagagcagaagacggtacccctagaataagccacggctaactacgtgccagcagccgcggtaat

SEQ ID NO: 9692 - DNA, 473 bp, unidentified
  misc_feature 1..473: note = Ascusbbf_460192, encodes 16S rRNA
  source 1..473: mol_type = genomic DNA
agagtttgatcatggctcaggatgaacgctggcggcgtgcctaatacatgcaagtcgagcggtaacacttcgggtgacgagcggcggacggctgagtaacacgtaggaacgtaccccaaagtgagggataagcaccagaaatggtgtctaataccgcatatgctcttcggaggaaagcttcggcgctttgggaacggcctgcgcatgattagcttgttggtgaggtaatggcttaccaaggcgacgatcattagctggtctgagaggatgatcagccagactgggactgagaacggcccagactcctacgggaggcagcagtagggaattttccacaatgggcgaaagcctgatggagcaacgccgcgtgcaggatgaaggcctttgggctgtaaactgcttttattggtgacgattatgacggtagccaatgaataaggatcggctaactccgtgccagcagccgcggtaat

SEQ ID NO: 9693 - DNA, 490 bp, unidentified
  misc_feature 1..490: note = Ascusbbf_1507162, encodes 16S rRNA
  source 1..490: mol_type = genomic DNA
agagtttgatcatggctcaggacgaacgctggcggcgtgcttaacacatgcaagtcggacggtaaggcccttcggggtacacgagtggcgaacgggtgagtaacgcgtgagtaacctgcccctgactttgggataacggatggaaacgtctgctaataccgaatattcagttctccgggcatccggggggttggaaagttttttcggtcagggatggactcgcgtcctatcagcttgttggtggggtaatggcctaccaaggcgtcgacgggtagccggcctgagagggcgaccggccacattgggactgagatacggcccagactcctacgggaggcagcagtggggaatattgcacaatggacgaaagtctgatgcagcaacgccgcgtgcgggatgacggccttcgggttgtaaaccgctttcagccatgacgaagcgaaagtgacggtagtggcagaagaagcaccggctaactacgtgccagcag

SEQ ID NO: 9694 - DNA, 490 bp, unidentified
  misc_feature 1..490: note = Ascusbbf_796064, encodes 16S rRNA
  source 1..490: mol_type = genomic DNA
agagtttgatcatggctcaggatgaatgctagctacaggcctaacacatgcaagtcgaggggcagcatggagaaagcttgctttctctgatggcgaccggcgaatgggtgagtcacgcgtgtccaacctgcctccggcccggggatagcccttggaaatgaggattaagacccgatacgtgcgcgttccgcatggcgtgcgcatgaaacaggaccggagatggggacgcgtcggattagctggacggctgggcaaaggcccaccgtggcgacgatccgcaggggttctgagaggaaggtcccccacactggcactgagacacgggccagactcctacgggaggcagcagtgaggaatattggtcaatggccgcgaggctgaaccagccaagtagcgtgcaggacgacggccctatgggttgtaaactgcttttatgcggggataaagttcgccatgcgtggtgttttgcatgtaccgcatgaataaggac

SEQ ID NO: 9695 - DNA, 490 bp, unidentified
  misc_feature 1..490: note = Ascusbbf_896334, encodes 16S rRNA
  source 1..490: mol_type = genomic DNA
agagtttgatcctggctcaggatgaacgctggcggcgtgcttaacacatgcaagtcgaacgaagaaggttagaatgagagcttcggcaggatttctatctatcttagtggcggacgggtgagtaacgcgtgagcaacctgcctttcagagggggataacgtcttgaaaaggacgctaataccgcatgagatcgtagttccacatggaatagcgaccaaaggagcaatccgctgaaagatgggctcgcgtccgattagatagttggcggggtaacggcccaccaagtcgacgatcggtagccggactgagaggttgaacggccacattgggactgagacacggcccagactcctacgggaggcagcagtgagggatattggtcaatgggggaaaccctgaaccagcaacgccgcgtgagggatgacggtcttcggattgtaaacctctgtcctctgtgaagataatgacggtagcagaggaggaagccccg

SEQ ID NO: 9696 - DNA, 173 bp, unidentified
  misc_feature 1..173: note = Ascusbbf_399430, encodes 16S rRNA
  source 1..173: mol_type = genomic DNA
agagtttgatcctggctcagcagccgcggtaatgccagcagccgcggtaatctgtctcttatacacagagtttgatcatggctcagccagcagccgcggtaatgccagcagccgcggtaatctgtctcttatacacagagtttgatcatggctcagccagcagccgcggtaat

SEQ ID NO: 9697 - DNA, 490 bp, unidentified
  misc_feature 1..490: note = Ascusbbf_333214, encodes 16S rRNA
  source 1..490: mol_type = genomic DNA
agagtttgatcctggctcaggacgaacgctggcggcgtgcctaacacatgcaagtcgagcggggattgtggagagcttgctcaaagcaattctagcggcggacgggtgagtaacgcgtgagcaacctgcctttcacagggggataacgcatcgaaagatgtgctaataccgcgtaagaccacggtgtcgcatgacacaggggtcaaaggagcaatccggtgagagatgggctcgcgtccgattagctagttggtgagataacagcccaccaaggcgacgatcggtagccgacctgagagggtgatcggccacattggaactgagagacggtccagactcctacgggaggcagcagtggggaatattgcacaatgggggaaaccctgatgcagcgacgccgcgtgagtgaagaagtatttcggtatgtaaagctctatcagcagggaagaaaatgacggtacctgactaagaagccccggctaactacgtg

SEQ ID NO: 9698 - DNA, 481 bp, unidentified
  misc_feature 1..481: note = Ascusbbf_1357332, encodes 16S rRNA
  source 1..481: mol_type = genomic DNA
agagtttgatcatggctcaggatgaacgctggcggcgtgcctaatacatgcaagtcgagcggtaaggccccttcgggggtacacgagcggcggacggctgagtaacacgtaggaacgtaccccaaagtgagggataagcaccggaaacggtgtctaataccgcatgtggtcttcggattaaagctttatgcgctttgggagcggcctgcgtaagattagcttgttggtgaggtaagagctcaccaaggcgacgatctttagctggtctgagaggatgatcagccagactgggactgagacacggcccagactcctacgggaggcagcagtagggaattttccacaatgggcgaaagcctgatggagcaacgccgcgtgcaggatgaaggccttagggtcgtaaactgcttttatatgtgaagattatgacggtagcatatgaataaggatcggctaactccgtgccagcagccgcggtaat

SEQ ID NO: 9699 - DNA, 490 bp, unidentified
  misc_feature 1..490: note = Ascusbbf_322344, encodes 16S rRNA
  source 1..490: mol_type = genomic DNA
agagtttgatcctggctcaggatgaacgctggcggcgtgcctaacacatgcaagtcgaacgaagcgtctcgatattttcggatggagagatgactgagtggcggacgggtgagtaacgcgtgggtaacctgcctcacactgggggacaacagttagaaatgactgctaataccgcataagcgcacagtactgcgtggtacagtgtgaaaaactccggtggtgtgagatggacccgcgtctgattagctagttggtggggtaacggcctaccaaggcgacgatcagtagccgacctgagagggtgaccggccacattgggactgagacacggaccaaactcctacgggaggcagcagtgaggaatattggtcaatgggcgaaagcctgaaccagccaagtagcgtgcaggacgacggccctatgggttgtaaactgcttttataggggaataaagttatccacgtgtggatatttgcatgtaccctatgaa

SEQ ID NO: 9700 - DNA, 490 bp, unidentified
  misc_feature 1..490: note = Ascusbbf_1616127, encodes 16S rRNA
  source 1..490: mol_type = genomic DNA
agagttgatcctggctcaggatgaacgctagcgacaggcttaacacatgcaagtcgaggggcagcgggggcgatggcaacattgcccgccggcgaccggcgcactggtgagtaacacgtatgcaacctgccccgcacagggggataacccagagaaatttggcctaataccccgtaacaccgtcgggggcatccccggtggttgaaagaggcgactcggtgcgggatgggcatgcggcgcattagatagttggcggggcgacggcccaccaagtcgacgatgcgtaggggttctgagaggaaggtcccccacattggtactgagacacggaccaaactcctacgggaggcagcagtgaggaatattggtcaatgggcgaaagcctgaaccagccaagtagcgtgcaggatgacggccctatgggttgtaaactgcttttataggggaataaagttatccacgtgtggatatttgcatgtaccctatgaat

SEQ ID NO: 9701 - DNA, 490 bp, unidentified
  misc_feature 1..490: note = Ascusbbf_538427, encodes 16S rRNA
  source 1..490: mol_type = genomic DNA
agagtttgatcctggctcaggacgaacgctggcggcgtgcctaacacatgcaagtcgaacgaagaaattgttttcggatgatttcttagtggcggacgggtgtgtaacgcgtgaataacctgcccttcagagtggaatagcgtttggaaacgaacggtaataccgcataatatcaacggatcgcatggtctgatgatcaaaggggaaactcgctgaaggatggattcgcgtccgattagccagttggcggggtaacggcccaccaaagcgacgatcggtagccagactgagaggtcgaacggccacattgggactgagacacggcccagactcctacgggaggcagcagtgggggatattgcacaatggaggaaactctgatgcagcaacgccgcgtgagggaagaaggttttcggattgtaaacctctgtctttggtgaagaagaagacggtagccaaggaggaagctccggctaactacgtgccagca

SEQ ID NO: 9702 - DNA, 490 bp, unidentified
  misc_feature 1..490: note = Ascusbbf_1559906, encodes 16S rRNA
  source 1..490: mol_type = genomic DNA
agagtttgatcatggctcaggacgaacgctggcggcgtgcttaacacatgcaagtcgaacgaggattatttgggagcttgctcccgggtaatccgagtggcggacgggtgagtaacgcgtgaacaatctgtctcatacagggggataacgcatcgaaagatgtgctaataccgcatatgaccacgccggggcatcccggagaggtgaaaggagcaatccggtatgaggtgagttcgcgtctgattagatagttggtggggtaacggcccaccaagtcgacgatcagtagccggactgagaggttgaacggccacattgggactgagatacggcccagactcctacgggaggcagcagtggggaatattgggcaatgggcgcaagcctgacccagcaacgccgcgtgaaggaagaaggctttcgggttgtaaacttcttttaagggggaagagcagaagacggtacccctagaataagccacggctaacta

SEQ ID NO: 9703 - DNA, 490 bp, unidentified
  misc_feature 1..490: note = Ascusbbf_754148, encodes 16S rRNA
  source 1..490: mol_type = genomic DNA
agagtttgatcatggctcagaacgaacgctggcggcaggcttaacacatgcaagtcgaacgcccctccttcaagcaagcttgaaggatttcttccttgtgaaggatttcaagcaagctgggcttgcttgatggaggggagtggcagacgggtgagtaacgcgtgggaatctacctatctctacggaataacccagggaaacttggactaataccgtatacgcccttttggggaaagatttatcggggatggatgagcccgcgttggattagctagttggtggggtaagggcctaccaaggcgacgatccatagctggtctgagaggatgatcagccacattgggactgagacacggcccaaactcctacgggaggcagcagtggggaatattggacaatgggcgcaagcctgatccagccatgccgcgtgagtgatgaaggccctagggttgtaaagctctttcaacggtgaagataatgacggtaaccg

SEQ ID NO: 9704 - DNA, 490 bp, unidentified
  misc_feature 1..490: note = Ascusbbf_1551772, encodes 16S rRNA
  source 1..490: mol_type = genomic DNA
agagtttgatcctggctcaggatgaacgctggcggcgtgcctaacacatgcaagtcgaacggcagcatggtctagcttgctagactgatggcgagtggcggacgggtgagtaacgcgtgggaatatgccttaaagagggggacaacctggggaaactcaggctaataccgcatatgctctgaggagtaaagctggggacttttaagcctggcgctttaagaatagcctgcgtccgattagctagttggtggggtaagggcctaccaaggcgacgatcggtagctggtctgagaggacgaacagccacactgggactgagacacggcccagactcctacgggaggcagcagtagggaattttgcgcaatgggcgaaagcctgacgcagcaacgccgcgtgatcgagacgcttttcggagtgtaaagatctgtcagtggggacgaagaatgactgtacccacagaggaagcaccggctaactccgtgccagc

SEQ ID NO: 9705 - DNA, 490 bp, unidentified
  misc_feature 1..490: note = Ascusbbf_573133, encodes 16S rRNA
  source 1..490: mol_type = genomic DNA
agagtttgatcctggctcagagcgaacgctggcggcaggcctaacacatgcaagtcgagcgcccagcaatgggagcggcagacgggtgagtaacgcgtggggatctacccattggtacggaataacccagggaaacttggactaataccgtatgtgcccttcgggggaaagatttatcgccaatggatgaacccgcgtctgattagctagttggtgaggtaaaggctcaccaaggcgacgatcagtagctggtctgagaggatgatcagccacactgggactgagacacggcccagactcctacgggaggcagcagtggggaatattggacaatgggcgcaagcctgatccagccatgccgcgtgagtgatgaaggccttagggttgtaaagcacttttgcattcgaggaagacagcacgtaaataaacgtgttatttgacgttagagtgtgaataagcaccggcaaactccgtgccagcagccgcggta

SEQ ID NO: 9706 - DNA, 490 bp, unidentified
  misc_feature 1..490: note = Ascusbbf_1550542, encodes 16S rRNA
  source 1..490: mol_type = genomic DNA
agagtttgatcctggctcagattgaacgctggcggcaggcttaacacatgcaagtcgaacggaaaggccccgctcgcggggtactcgagtggcgaacgggtgagtaacacgtgggtgatctgccctgcacttcgggataagcctgggaaactgggtctaataccggatatgacttccctttagtgtggggggtggaaagatttatcggtgcaggatgagcccgcggcctatcagcttgttggtggggtaatggcctaccaaggcgtcgacgggtagccggcctgagagggtgatcggccaaactgggactgagacacggcccagactcctacgggagacagcagttaggaatattcgtcaatgggggaaaccctgaacgagcaatgccgcgtgaaggatgaaggtcctatggattgtaaactgcttttgtacggggataaagtgagtcacgtgtggcttattgcaggtaccgtacgaataaggaccggct

SEQ ID NO: 9707 - DNA, 490 bp, unidentified
  misc_feature 1..490: note = Ascusbbf_1322051, encodes 16S rRNA
  source 1..490: mol_type = genomic DNA
agagtttgatcctggctcaggatgaacgctagcggcaggcttaacacatgcaagtcgaggggtaacgcggggtagcaatactctggcgacgaccggcgcacgggtgcgtaacgcgtatgcaacctacctgtaacaggggtataacggagagaaatttccactaatcccccatattgttattctttcgcatgttaggataacgaaagcttcggtggttccggatgggctggcgtgacattagctagttggtaaggtaacggcttaccaaggcgatgatgtctaggggagctgagaggcttatctccgtagatggtacagtggaacggaccagactcctacgggaggcagcagtgaggaatattggtcaatggacggaagtctgaaccagccatgacgcgtggaggaagaaggtcctatgggttgtaaactccttttgttcgagagtaataagggctttgcgaagcccgatgagagtatcggacgaataagc

SEQ ID NO: 9708 - DNA, 490 bp, unidentified
  misc_feature 1..490: note = Ascusbbf_1301251, encodes 16S rRNA
  source 1..490: mol_type = genomic DNA
agagtttgatcctggctcaggatgaacgctagctacaggcttaacacatgcaagtcgaggggcatcatgggaggacttcggtccttttgatggcgaccggcgcacgggtgagtaacgcgtatccaaccttccccctactcaggcatagcccggtgaaaaccggattaactcctgatagtttcactagatggcatctgacggtgaataaagctctgcggtaagggatggggatgcgtctgattagcttgttggcggggtaacggcccaccaagcctacgatcagtaggggttctgagaggaaggtcccccacattggaactgagacacggtccaaactcctacgggaggcagcagtgaggaatattggtcaatggacgaaagtctgaaccagccaagtagcgtgcaggacgacggccctatgggttgtaaactgcttttatgcggggataaagtgcgccacgcgtggtgtattgcaggtaccgcaagaata

SEQ ID NO: 9709 - DNA, 490 bp, unidentified
  misc_feature 1..490: note = Ascusbbf_1301849, encodes 16S rRNA
  source 1..490: mol_type = genomic DNA
agagtttgatcctggtcaggacgaacgctggcggcgtgcctaacacatgcaagtcgagcgagaatctttcattggaacccttcggggtgaagaaggaagaggagagcggcggacgggtgagtaacgcgtgagcaacctgccttaaggagggggataacacagggaaacctgtgctaataccgcataatatatatttaccgcatggtagatatatcaaaactccggtgccttaagatgggctcgcgtccaattagctagttggaggggtaacggcccaccaaggcaacgattggtagccggactgagaggttgaacggccacattggaactgagaaacggtccagactcctacgggaggcagcagtgggggatattgcccaatgggggaaaccctgatgcagcgacgccgcgtgaaggaagaagtatctcggtgtgtaaacttctatcagcagggaagataatgacggtacctgactaagaagccccggct

SEQ ID NO: 9710 - DNA, 469 bp, unidentified
  misc_feature 1..469: note = Ascusbbf_1510709, encodes 16S rRNA
  source 1..469: mol_type = genomic DNA
agagtttgatcctggctcagagcgaacgctggcggcaggcctaacacatgcaagtcgagcgccctttcgggggagcggcagacgggtgagtaacgcgtggggatctacccattggtacggaataactctgggaaactggaactaataccgtatgagcccttcgggggaaagatttatcgccaatggatgaacccgcgtcagattagctagttggtggggtaaaggctcaccaaggcgacgatctgtagctggtctgagaggatgatcagccacactgggactgagacacggcccagactcctacgggaggcagcagtggggaatattggacaatgggcgcaagcctgatccagccatgccgcgtgtgtgtagaaggccttcgggttgtaaagcactttcggaggggaggaacaaatgacgttaccctcagaagaagcaccggctaactccgtgccagcagccgcggtat

SEQ ID NO: 9711 - DNA, 490 bp, unidentified
  misc_feature 1..490: note = Ascusbbf_796309, encodes 16S rRNA
  source 1..490: mol_type = genomic DNA
agagtttgatcctggctcaggttgaacgctggcgtcatgcttaacacatgcaagtcgaacgagaatttataaaaattttagctccggcttttatttttattttttttagtggcggacgggtgagtaacgcgtaagaacctaccttatggtgagggataccaactggaaacggttgctaatacctcatatgctgagaagtaaaaggtttacatcgccataagaggggcttgcgtctgattagttagttggtggggtaaaggcttaccaagactatgatcagtagttggtctgagaggacgatcagccacactgggactgagacacggcccagactcctacgggaggcagcagtgaggaattttccgcaatgggcgaaagcctgacggagcaatgtcgcgtggaggaagaaggcccgtgggtcgtaaactccttttgtcaaaaaagaaaaaatgacggtatttgacgaataagcattggctaactttgtgcc

SEQ ID NO: 9712 - DNA, 490 bp, unidentified
  misc_feature 1..490: note = Ascusbbf_1851627, encodes 16S rRNA
  source 1..490: mol_type = genomic DNA
agagtttgatcctggctcaggatgaacgctagcggcaggcttaacacatgcaagtcgaggggcagcgggagtagcaatacttgccggcgaccggcgcacgggtgcgtaacgcgtatgcaacctacctataacagggggataatccggagaaatctggtctaataccccataacacttagtacggcatcgtacatagttgaaattttcggaggttatagatgggcatgcgtgacattagctagatggtgaggtaacggctcaccatggcaacgatgtctagggggactgagaggttaaccccccacactggtactgagacacggaccagactcctacgggaggcagcagtgaggaatattggtcaatggacggaagtctgaaccagccatgccgcgtgcaggatgacggctctatgagttgtaaactgcttttatacgagggtaaagtgggttacgtgtaaccttttgaaagtatcgtatgaataaggatc

SEQ ID NO: 9713 - DNA, 490 bp, unidentified
  misc_feature 1..490: note = Ascusbbf_1491811, encodes 16S rRNA
  source 1..490: mol_type = genomic DNA
agagtttgatcctggctcaggacgaacgctggcggcgtgcctaacacatgcaagtcgaacggagtaattgcttcggtgattacttagtggcgaacgggtgagtaacgcgtgaggaacctgcctttcagtgggggacaacagttggaaacgactgctaataccgcataatgttatcgggtcgcatggcctggtaaccaaagatttattgctgaaagatgggctcgcgtccgattaggtagttggtgaggcaacggctcaccaagccgacgatcggtagccggactgagaggtcgatcggccacattgggactgagacacggcccagactcctacgggaggcagcagtgggggatattgcacaatgggcgcaagcctgatgcagcaacgccgcgtgagggaggacggtcttcggattgtaaacctctgtccttggggaagaaacaaatgacggtacccttggaggaagccacggctaactacgtgccagcag

SEQ ID NO: 9714 - DNA, 294 bp, unidentified
  misc_feature 1..294: note = Ascusbbf_1191691, encodes 16S rRNA
  source 1..294: mol_type = genomic DNA
agagtttgatcatggctcagaacgaacgctggcggcacgcttaacacatgcaagtcgaacggtgcaatggggcttgctctattgcatagtggcggacgggtgagtaacacgtaggaacctacctggtaatggtggatagcttcgggaaactggaggtaatacagcatgagctcgagagaggaaaggccataaggtcgttaccagaggggcctgcggatgattaggtagttggtggggtaaaggcctaccaagccgacgatcaatagctggtctgaggccagcagccgcggtaat

SEQ ID NO: 9715 - DNA, 490 bp, unidentified
  misc_feature 1..490: note = Ascusbbf_610727, encodes 16S rRNA
  source 1..490: mol_type = genomic DNA
agagtttgatcctggctcagattgaacgctggcggcaggcttaacacatgcaagtcgaacgatgagtatctagcttgctagatgcgattagtggcgaacgggtgagtaatgcttaggaatctgcctagtagtgggggatagcttggggaaacccaaattaataccgcatacgtcttacgagagaaagggggcttttagctctcgctattagatgagcctaagtcggattagctagttggtggggtaaaggcctaccaaggcgacgatctgtagctggtcttagaggatgatcagccacactgggactgagacacggcccagactcctacgggaggcagcagtggggaatattggacaatgggcgaaagcctgatccagccatgccgcgtgtgtgaagaaggccttttggttgtaaagcactttaagtggggaggaaaagctgttgattaatacccaatagccctgacgttacccacagaataagcaccgg

SEQ ID NO: 9716 - DNA, 490 bp, unidentified
  misc_feature 1..490: note = Ascusbbf_1111649, encodes 16S rRNA
  source 1..490: mol_type = genomic DNA
agagtttgatcctggctcaggataaacgctagcggcaggcctaacacatgcaagtcgaggggcagcggatagagtagcttgctactcttgccggcgaccggcgcacgggtgcgtaacgcgtatgcaacctacctttaacaggggcataacactgagaaatcggtactaattccccataatatttcgagaggcatctcttgaggttgaaaactccggtggttaaagatgggcatgcgttgtattagctagttggtgaggtaacggctcaccaaggcgacgatacatagggggactgagaggttaaccccccacactggtactgagacacggaccagactcctacgggaggcagcagtgaggaatattggtcaatggacgcaagtctgaaccagccatgccgcgtgcaggatgacagctctatgagtcgtaaactgcttttgcagaagggtaaacccggatacgtgtatccggctgaaagtactctgcgaat

SEQ ID NO: 9717 - DNA, 490 bp, unidentified
  misc_feature 1..490: note = Ascusbbf_1569571, encodes 16S rRNA
  source 1..490: mol_type = genomic DNA
agagtttgatcatggctcaggacgaacgctggcggcgggcttaacacatgcaagtcgcgggagagccggaccttcgggtccggggagaccggcggatgggtgagtaaagcgtaggtaatctaccgtaaggacggggataacatcgcgaaagcggtgctaataccggatgatgcagcggggccgcatggccacagttgttaaatctgccttagggcgggccttatgatgaacctgcgtgccattagttagttggtagggtaacggcctaccaagacgatgatggctagggggtctgagaggatgatcccccacactgggactgagacacggcccagactcctacgggaggcagcagtgaggaatcttgcgcaatgggggcaaccctgacgcagccacgccgcgtgctggaagacggccctatgggttgtaaactgcttttataggggaataaagttatccacgtgtggatatttgcatgtaccctatgaat

SEQ ID NO: 9718 - DNA, 285 bp, unidentified
  misc_feature 1..285: note = Ascusbbf_969245, encodes 16S rRNA
  source 1..285: mol_type = genomic DNA
agagtttgatcctggctcaggatgaacgctggcggcgtgcctaacacatgcaagtcgaacgaagttgtttccacccgacagattatcttcggatatgaagtcaccggaaacgcttagtggcggacgggtgagtaacgcgtgggcaacctgccctacaaaccctgatgcagcgacgccgcgtgagcgatgaagtatttcggtatgtaaagctctatcagcagggaagataatgacggtacctgactaagaagccccggctaaatacgtgccagcagccgcggtaat

SEQ ID NO: 9719 - DNA, 490 bp, unidentified
  misc_feature 1..490: note = Ascusbbf_574454, encodes 16S rRNA
  source 1..490: mol_type = genomic DNA
agagtttgatcctggctcagaatgaacgctggcggcgtgcctaacacatgcaagtcgagcgagaaaagtcttcggacttagtaaagcggcgaacgggtgagtaacgcgtgagaatctaccttttggtgaagaataccctcgagaaatcgaggttaatactgcatacgtctcgtaagagagaaaggcggctttatgctgtcgccgaaagatgagcttgcgtactattagctagttggtgaggtaatggcttaccaaggcgatgatggttaaccggcctgagagggtgtacggtcacattggaacttagacacggtccagactcctacgggaggcagcagtgaggaatattgcgcaatgggcgaaagcctgacgcagcgacgccgcgtgagggatgaaggttttaggatcgtaaacctctgttaagtgggaagaaaacccaagctctaatacagtttgggactgacggtaccattagagaaagcaccggcta

SEQ ID NO: 9720 - DNA, 490 bp, unidentified
  misc_feature 1..490: note = Ascusbbf_1772042, encodes 16S rRNA
  source 1..490: mol_type = genomic DNA
agagtttgatcatggctcaggatgaacgctagcggcaggcttaatacatgcaagtcgtggggcagcaggggtagcaatacccgctggcgaccggcaaacgggtgaggaacatgtacgcaacctacctttaactggaggatagcccctcgaaagagggattaatactccgtaacatcccgacacagcattgtgacgggattatagctccggcggttaaagatgggcgtgcacctgattagatagttggcggggtaatggcccaccaagtctgcgatcagtaattggtgtgagagcacgaccagtcacacgggcactgagacacgggcccgactcctacgggaggcagcagtaaggaatattggtcaatggacgaaagtctgaaccagccatgccgcgtggaggattaaggccctctgggttgtaaactccttttatctgggaagaaatgcattttttctaaaatgcttgacggtaccagaggaataagcac

SEQ ID NO: 9721 - DNA, 490 bp, unidentified
  misc_feature 1..490: note = Ascusbbf_803678, encodes 16S rRNA
  source 1..490: mol_type = genomic DNA
agagtttgatcctggctcagattgaacgctggcggcatggttaaaacatgcaagtcgaacgcgaacgggacttcggtccttagtagagtggcgaaagggcgagtaatgcgtttctaacgtgccccaaggtcagggatagcccagggaaacctggattaatacctgatgaccccgcagcgtcgcatggcgccgcgggcaaaggcttgctgccttgggttcgggaaacgtcctatcagcttgttggtaaggtaacggcttaccaaggctaagacgggtagcgggtgtgagagcacggcccgccgcatcgggactgagacactgcccggactcctacgggaggctgcagtaacgaatattggacaatgcgcgaaagcgtaatccagcaatgccgcgtgcaggatgaagcccctcggggtgtaaactgctgtcaggagctaccaacacaatgaggagctccagaggaagagccggccaactctgtgccagcagc

SEQ ID NO: 9722 - DNA, 490 bp, unidentified
  misc_feature 1..490: note = Ascusbbf_528216, encodes 16S rRNA
  source 1..490: mol_type = genomic DNA
agagtttgatcatggctcaggatgaacgctggcggcgcgcctaacacatgcaagtcgaacggccggacccacctcggtgggcgaggcagtggcgaacggctgagtaacacgtgggcaacctgcccccctccccgggacagcctcgggaaaccgtgggtaataccggatactccgccccctccgcatgggaggggcgggaaagctccggtggatagagatgggcccgcgttagattggccagttggcggggtaacggcccaccaaagcgacgatctatagccggcctgagagggcgaccggccacattgggactgagacacggcccaaactcctacgggaggcagcagtggggaatattgcacaatgggggaaaccctgatgcagcgacgccgcgtgagtgaagaagtatttcggtatgtaaagctctatcagcagggaagaaaaaggacggtacctgcacaagaagccccggctaactacgtgccagcag

SEQ ID NO: 9723 - DNA, 490 bp, unidentified
  misc_feature 1..490: note = Ascusbbf_765134, encodes 16S rRNA
  source 1..490: mol_type = genomic DNA
agagtttgatcctggctcaggatgaacgctagctacaggcttaacacatgcaagtcgaggggcagcatgaagtttgcttgcaaactttgatggcgaccggcggatgggtgagtaacgcgtatccaacctgcccccttcccgggcacagcccttggaaacaaggattaactcccgatggtgtcagtcaggcgcatgcctttctgaccaaatgtttaaggaaggggatggggatgcgtcccattagcttgttgacggggtaacggcccaccaaggctccgatgggtaggggttctgagaggaaggtcccccacactggaactgagacacggtccagactcctacgggaggcagcagtgaggaatattggtcaatggaggcaactctgaaccagccaagtagcgtgagggatgaccgccctacgggttgtaaacctcttttgtcggggaataaaccgcgccacgtgtggcgccctgcatgtacccgcagaata

SEQ ID NO: 9724 - DNA, 490 bp, unidentified
  misc_feature 1..490: note = Ascusbbf_1657164, encodes 16S rRNA
  source 1..490: mol_type = genomic DNA
agagtttgatcctggctcaggacgaacgctggcggcgtgcttaacacatgcaagtcgaacggtgacgagcagcttgctgctctgatcagtggcgaacgggtgagtaacacgtgagcaacctacccttgactccgggataacagctggaaacagctgctaataccggatacgacctcgaccgacatcagttgaggtggaaagttctggcggtcaaggatgggctcgcggcctatcagctagttggtgaggtaacggctcaccaaggcttcgacgggtagccggcctgagagggcgaccggccacactgggactgagatacggcccagactcctacgggaggcagcagtgaggaatattggtcaatggacgagagtctgaaccagccaagtagcgtgcaggacgacggccctatgggttgtaaactgcttttatgcggggataaagtgcgccacgtgtggtgtattgcaggtaccgcaagaataaggaccgg

SEQ ID NO: 9725 - DNA, 490 bp, unidentified
  misc_feature 1..490: note = Ascusbbf_917079, encodes 16S rRNA
  source 1..490: mol_type = genomic DNA
agagtttgatcctggctcaggacgaacgctggcggcgtgcttcatacatgcaagtcgaacgagaagttaccttcgggtaatggacaatggcggacgggtgagtaaaatgtagagaatctgcccttgagatggggacaacagttggaaacgactgctaatacccaatatgcgcgtagttgagatactattcttgaaagatttatcgcttcaggatgagtctgcatctgattagctagttggaggtgtgatggaccaccaaggcgacgatcagtagctggtttgagaggatgatcagccacaatgggactgagacacggcccatactcctacgggaggcagcagtagggaattttgcgcaatgggggaaaccctgacgcagcaacgccgcgtgaatgaagaagcccttcggggtgtaaagttctgtcagtggggacgaaacttgacggtagccacagaggaagcatcggctaactccgtgccagcagccgcg

SEQ ID NO: 9726 - DNA, 490 bp, unidentified
  misc_feature 1..490: note = Ascusbbf_915129, encodes 16S rRNA
  source 1..490: mol_type = genomic DNA
agagtttgatcctggctcaggatgaacgctagctacaggcttaacacatgcaagtcgcggggcatcatggcatgtagcaatacatgctgatggcgaccggcggatgggtgagtaacgcgtatccaacctggccctatctcgggtacagcccctcgaaagagggattaattcccgatgttccctggtatccgcatgttttccagggcaaaggcatttgtcggatagggatggggatgcgttccattaggcagtcggcggggcaacggcccaccaaggcgactatgggtagctgggttgagagaccgaccagccagattgggactgagacacggcccagactcctacgggaggcagcagtggggaatcttgcgcaatgggcggaagcctgacccagcgacgccgcgtgagggaagacagccttcgggttgtaaacctctgttgcaggggaagaaggaagtgacggtaccctgcgaggaagctccggctaact

SEQ ID NO: 9727 - DNA, 490 bp, unidentified
  misc_feature 1..490: note = Ascusbbf_1248726, encodes 16S rRNA
  source 1..490: mol_type = genomic DNA
agagtttgatcctggctcaggacgaacgctggcggcgtgcctaacacatgcaagtcgaacgagaatcaatgggtagaggcttcggccaattgaagttgaggacggtggcggacgggtgagtaacacgtgagcaacctgcctttcagagggggacaacagttggaaacgactgctaataccgcataacgtatattgagggcatcctcgatataccaaagattttatcgctgaaagatgggctcgcgtctgattagctagttggtggggtaatggcctaccaaggcgacgatcagtagccggactgagaggttgaacggccacattgggactgagatacggcccagactcctacgggaggcagcagtggggaatattgggcaatgggggcaaccctgacccagcaacgccgcgtgaaggaagaaggtcttcggattgtaaacttcttttgtcagggacgatagtgacggtacctgacgaataagccacggct

SEQ ID NO: 9728 - DNA, 490 bp, unidentified
  misc_feature 1..490: note = Ascusbbf_1678695, encodes 16S rRNA
  source 1..490: mol_type = genomic DNA
agatttgatcatggctcaggacgaacactggcggcgtgcttaacacatgcaagtcgaacggggcgaagagaagcttgcttttcctagcctagtggcaaacgggtgagtaacgcgtaggcaacctgcccttcagatggggacaacatttcgaaaggaatgctaataccgaatgacgtatcctggtcgcatgacctagataccaaaggccgggcaaccggtcactgaaggatgggcctgcgtctgattagctagttggtggggtaacggcctaccaaggcgacgatcagtagccggactgagaggttgaacggccacattgggactgagatacggcccagactcctacgggaggcagcagtcgggaatattgcgcaatggaggaaactctgacgcagtgacgccgcgtataggaagaaggttttcggattgtaaactattgtcgtgagggaagaaattgacagtacctcaggaggaagctccggctaactac

SEQ ID NO: 9729 - DNA, 490 bp, unidentified
  misc_feature 1..490: note = Ascusbbf_633303, encodes 16S rRNA
  source 1..490: mol_type = genomic DNA
agagtttgatcatggctcaggatgaacgctggcggcgtgcttaacacatgcaagtcgagcgagaaatattcaaacgattcttcggatgaaattgaatatggacagcggcggacgggtgagtaacgcgtgggaaacctgccttatacaaagggatagcctcgggaaaccgggattaataccttatgacacttcactaccgcatggtagagaagtcaaaactccggtggtataagatggtcccgcgtcccattagctagttggtgagataaaagctcaccaaggcgacgatgggtagccggccttagcgggtgaacggccacactggaactgagacacggtccagactcctacgggaggcagcagtggggaatattgcacaatggaggaaactctgatgcagcgacgccgcgtgagtgatgaaggccctagggttgtaaagctctttcggcggggacgataatgacggtacccgcagaagaagccccggcta

SEQ ID NO: 9730 - DNA, 490 bp, unidentified
  misc_feature 1..490: note = Ascusbbf_905937, encodes 16S rRNA
  source 1..490: mol_type = genomic DNA
agagtttgatcctggctcagaacgaacgctggcggcaggcttaacacatgcaagttgagcgggaactgagggtagcttgctacttgaggggagagcagcgtactggtgagtaacacgtgggaacataccttttggtgggggacaacagttggaaacgactgctaataccgcataagccctaagggggaaagattaattgccgaaagattggcccgcggaagattaggtagtaggtggggtaacggcccaccaaggcgacgatcagtaggggttctgagaggaaggtcccccacattgggactgagatacggcccagactcctacgggaggcagcagtcgggaatattgcgcaatggaggaaactctgacgcagtgacgccgcgtgcaggaagaaggttttcggatcgtaaagctctgttattggggaagaagaagtgacggtacccaatgaggaagtcccggctaattacgtgccagcagccgcggtaat

SEQ ID NO: 9731 - DNA, 490 bp, unidentified
  misc_feature 1..490: note = Ascusbbf_1171616, encodes 16S rRNA
  source 1..490: mol_type = genomic DNA
agagtttgatcatggctcaggacgaacgctggcggcgtgcttcatacatgcaagtcgaacgataaggtctcttcggagacacataagtggcggacgggtgagtaatgtgtagagaatctgccctagagtgggggacaacagttggaaacgactgctaataccgcatatgcgcgtagctgagatgctattcgtgaaaactccggtgctctgggatgagtctgcatctgattagctagttgggggtgtaatggctcacctaggcgacgatccctagctggtctgagaggatgaccagccacactggaactgagacacggtccagactcctacgggaggcagcagtggggaatattgcacaatgggcgcaagcctgatgcagccatgccgcgtgtatgaagaaggccttcgggttgtaaagtactttcagcgaggaggaaggcgttaaggttaataaccttggcgattgacgttactcgcagaagaagcacag

SEQ ID NO: 9732 - DNA, 490 bp, unidentified
  misc_feature 1..490: note = Ascusbbf_1429182, encodes 16S rRNA
  source 1..490: mol_type = genomic DNA
agagtttgatcatggctcagaatgaacgttggcggcgtggattaggcatgcaagtcgagcgagaacccgcaagggggacagcggcaaacggggtagtaatgtgtcggaacgtgcccagaggacggggatagcggcgggaaactgccggtaatacccgatgatctcgagagagcaaaggtgtgattccgcctttggagcggccgacatggtattagctagttggcggggtaacggcccaccaaggctttgatgcctaggggatgtgagagcatgatccccaccattgggactgagacactgcccagacacctacgggtggctgcagtcgagaatcttcgtcaatgggcgaaagcctgaacgagcgacgccgcgtgtgggatgaaggcccttgggttgtaaaccactgtcgagggggatgaaggcttgaaggtactccttcaagtttgacagagccctggaggaagcacgggctaagttcgtgccagcagcc

SEQ ID NO: 9733 - DNA, 490 bp, unidentified
  misc_feature 1..490: note = Ascusbbf_1430090, encodes 16S rRNA
  source 1..490: mol_type = genomic DNA
agagtttgatcctggctcagattgaacgctggcggaatgctttacacatgcaagtcgagcggcagcgcggggcaacctggcggcgagcggcgaacgggtgagtaatacatcggaacgtgcccagacgtgggggataactactcgaaagagtggctaataccgcatacgatctgaggatgaaagcgggggatcgcaagacctcgcgcgtctggagcggccgatggcagattaggtagttggtgaggtaaaggcttaccaagcctgcgatctgtagctggtctgagaggatgatcagccacactgggactgagacacggcccagactcctacgggaggcagcagtggggaattttggacaatgggcgaaagcctgatccagccattccgcgtgcaggatgaaggccctcgggttgtaaactgcttttgtacggaacgaaaaagctccggctaatacctggagtccatgacggtaccgtaagaataagcaccg

SEQ ID NO: 9734 - DNA, 490 bp, unidentified
  misc_feature 1..490: note = Ascusbbf_917230, encodes 16S rRNA
  source 1..490: mol_type = genomic DNA
agagtttgatcctggctcagaacgaacgctggcggcatgcctaacacatgcaagtcgaacgagaccttcgggtctagtggcgcacgggtgcgtaacacgtgggaacctgcccttaggttcggaataactcaccgaaaggtgtgctaataccggataatgtcttcggaccaaagatttatcgcctttggatgggcccgcgtaggattagctagttggtgaggtaatggctcaccaaggcgacgatccttagctggtcttagaggatgatcagccacactgggactgagacacggcccagactcctacgggaggcagcagtagggagttttcggcaatgggcgaaagcctgaccgagcaacgccgcgtgagtgagaaggtcttcggattgtaaagctctgttacgagggacgaacggtggggtcaggaaatgggccccaattgacggtacctcgccagaaagtgacggctaactacgtgccagcagccgcgg

SEQ ID NO: 9735 - DNA, 490 bp, unidentified
  misc_feature 1..490: note = Ascusbbf_1355149, encodes 16S rRNA
  source 1..490: mol_type = genomic DNA
agagtttgatcctggctcaggatgaacgctggcggcgtgcctaatacatgcaagtcgaacgagagtagcaatactctagtggcgaacgggtgagtaacacgtagataacctgccctaaagacgaggataacaccgggaaactggagctaaaactggataggacaatttgaggcatcttaaattgtttaaaggaccagcaatggtacactttaggaggggtctgcggcgcattagttagttggtagggtaatggcctaccaagacagtgatgcgtagccggactgagaggtcaaacggccacattgggactgagaacggcccaaactcctacgggaggcagcagaagggaattttcggcaatggggggaaccctgaccgagcaacgccgcgtgaatgacgaagttcttcggaatgtaaagttcttttattagtgaagaatggcagatggaaaaatctgaatgacggtaactaatgaataagccccggctaa

SEQ ID NO: 9736 - DNA, 490 bp, unidentified
  misc_feature 1..490: note = Ascusbbf_1016817, encodes 16S rRNA
  source 1..490: mol_type = genomic DNA
agagtttgatcatggctcaggatgaacgctggcggcgtgcctcagacatgcaagtcgaacgattaagacttccttcgggaagtgtataaagtggcgcacgggtgagtaacacgtaagtaatctgccctcgagtggggaataacgttcggaaacgaacgctaataccgcataacgcagcggcaccgcaaggtgacagttgttaaaggagtaattcgcttgaggaggagcttgcggcagattagcttgttggtaaggtaacggcttaccaaggctacgatctgtatccggtctaagaggacggtcggacacactgacactgaataacgggtcagactcctacgggaggcagcagtcgggaattttgggcaatgggcgaaagcctgacccagcaacgccgcgtgaaggatgaagtatttcggtatgtaaacttcgaaagaataggaagaataaatgacggtactatttataagctccggctaactacgtgcca

SEQ ID NO: 9737 - DNA, 470 bp, unidentified
  misc_feature 1..470: note = Ascusbbf_974811, encodes 16S rRNA
  source 1..470: mol_type = genomic DNA
agagtttgatcctggctcagaacgaacgctggcggcaggcttaacacatgcaagtcgaacgatgtagcaatacatagtggcgcacgggtgagtaacgcgtgggaatgtaccttttggtggggaataactccgggaaactggagctaataccgcatacgcccttcgggggaaagatttatcgccaaaagatcagcccgcgtgagattaggtagttggtggggtaatggcctaccaagcctacgatctctagctggtcttagaggatgaccagccacactggaactgagacacggtccagactcctacgggaggcagcagtggggaatattggacaatgggcgaaagcctgatccagccatgccgcgtgagtgatgaaggctctagggttgtaaagctctttcgccgatgaagataatgacggtagtcggagaagaagccccggctaacttcgtgccagcagccgcggtaat

SEQ ID NO: 9738 - DNA, 206 bp, unidentified
  misc_feature 1..206: note = Ascusbbf_964744, encodes 16S rRNA
  source 1..206: mol_type = genomic DNA
agagtttgatcctggctcagcagccgcggtaatgccagcagccgcggtaatctgtctcttatacacagagtttgatcatggctcagccagcagccgcggtaatagagtttgatcatggctcagcagccgcggtaatgccagcagccgcggtaatctgtctcttatacacagagtttgatcatggctcagccagcagccgcggtaat

SEQ ID NO: 9739 - DNA, 488 bp, unidentified
  misc_feature 1..488: note = Ascusbbf_558401, encodes 16S rRNA
  source 1..488: mol_type = genomic DNA
agagtttgatcctggctcagggctaacgctggcggcgcgcctaacacatgcaagtcgaacgggcacttcggtgctagtggcagacgggtgagtaacgcgtggataatgtgcctctttgctggggataccgtttcgaaaggaacgttaataccgaatgtgctgaatttgtggcatcacagattgagtaaactgttagggtgaagagagcggtccgcgttctatcagcttgttggtggggtaatggcctaccaaggctacgacggataactggtctgagaggatgatcagtcacactggaactgagacacggtccagactcctacgggaggcagcagtgaggaatcttgcacaatgggcgaaagcctgatgcagcgacgccgcgtgagggacgaaggccttcgggttgtaaacctctgtcagtggggaagaagaatgacggtacccactgaggaagcttcggctaactacgtgccagcagccgcggtaat

SEQ ID NO: 9740 - DNA, 490 bp, unidentified
  misc_feature 1..490: note = Ascusbbf_906955, encodes 16S rRNA
  source 1..490: mol_type = genomic DNA
agagtttgatcctggctcaggacgaacgctggcggcgtgcctaacacatgcaagtcgaacggaaaattgagcttcggttcaatttttagtggcgaacgggtgagtaacgcgtaggcaacctgccctttagacggggacaacattccgaaagggatgctaataccggatgtgacgctcctatcgcatgacgggagcgtgaaagatggcctctacacgtaagctatcgctaaaggatgggcctgcgtctgattagctagttggtagtgtaacggacaaccaaggcgatgatcagtagccggtctgagaggatgaacggccacattgggactgagacacggcccaaactcctacgggaggcagcagtggggaatattgcacaatgggggaaaccctgatgcagcgatgccgcgtgaaggaagaagtatctcggtatgtaaacttctatcagcagggaagaaaatgacggtacctgactaagaagccccggcta

SEQ ID NO: 9741 - DNA, 490 bp, unidentified
  misc_feature 1..490: note = Ascusbbf_1372541, encodes 16S rRNA
  source 1..490: mol_type = genomic DNA
agagtttgatcctggctcaggatgaacgctagcggcaggcttaacacatgcaagtcgaggggtaacgcggggtagcaatactctggcgacgaccggcgcacgggtgcgtaacgcgtatgcaacctacctgtaacaggggtataacggagagaaatttccactaatcccccatattgttattctttcgcatgttaggataacgaaagcttcggtggttacggatgggcatgcgtgacattagctagttggtaagttaccggcttacaaaggcgacgatgtctaggggatctgagaggcttatcaccagaactggtccttggcaacggaccagactcctacggtaggcagcagtgaggaatattggtcaatggacggaagtctgaaccagccatgccgcgtggaggaagaaggtcctatgggttgtaaactccttttgttcgagagtaataagggctttgcgaagcccgatgagagtatcggacgaataagc

SEQ ID NO: 9742 - DNA, 490 bp, unidentified
  misc_feature 1..490: note = Ascusbbf_936257, encodes 16S rRNA
  source 1..490: mol_type = genomic DNA
agagtttgatcttggctcaggacgaacgctggcggcgtgcctaacacatgcaagtcgagcgagaatttctgaaatgaattcttcggaaggaattttgggaaggaaagcggcggacgggtgagtaacgcgtgagtaacctgcctatcagagggggacaacatttcgaaaggaatgctaataccgcatgaaattgtattatcgcatgatagaacaatcaaagatttatcgctgatagatggactcgcgtctgattagatagttggtggggtaaagacctaccaagtcgacgatcagtagccgaactgagaggttgatcggccacattgggactgagacacggcccagactcctacgggaggcagcagtggggaatattgcgcaatgggggcaaccctgacgcagcaacgccgcgtgaaggatgaaggttttcggattgtaaacttctgatctaagggaaaaagagagtgatggtaccttaggagcaagctac

SEQ ID NO: 9743 - DNA, 210 bp, unidentified
  misc_feature 1..210: note = Ascusbbf_658728, encodes 16S rRNA
  source 1..210: mol_type = genomic DNA
agagtttgatcatggctcaggcagagctggcaaaacgcggtctgaatgaaactgaagtccgcgcacgccttgtccagaacggcattgacgtagataatctgaagccttcagactacgcatcttaccaggcaagaatcatgcagattctggatcagatgcaggcagaaaaagctggcactgcagcaaccacaggccagcagccgcggtaat

SEQ ID NO: 9744 - DNA, 490 bp, unidentified
  misc_feature 1..490: note = Ascusbbf_1701138, encodes 16S rRNA
  source 1..490: mol_type = genomic DNA
agagtttgatcctggctcaggacgaacgctggcggcgtgcctaacacatgcaagtcgagcggaggcatacaaggagcaatctgcgtatgtttcagcggcggacgggtgagtaacgcgtgggcaacctgcctttcactgggggataacgcggcgaaagccgcactaataccgcataagaccccgagggccgcatggcctgggggtcaaaggagcaatccggtggaagatgggcccgcgtccgattaggtagttggtggggtaaaggcctaccaagcctgagatcggtagccgacctgagagggtgatcggccacactggaactgagacacggtccaaactcctacgggaggcagcagtgaggaatattggtcaatgggcgagagcctgaaccagccaagtagcgtgcgggacgaaggccctatgggttgtaaaccgcttttacggggggataaagtgagtgacgtgtcattcattgcaggtaccccgcgaa

SEQ ID NO: 9745 - DNA, 490 bp, unidentified
  misc_feature 1..490: note = Ascusbbf_1244224, encodes 16S rRNA
  source 1..490: mol_type = genomic DNA
agagtttgatcctggctcagaacgaacgctggcggcgtgcctaacacatgcaagtcgaacgagaaagtccttcgggatgagtatagtggcgcacgggtgagtaatacataggaacgtacctctaggtggggaataaccaagggaagccttggctaataccgcatgatatcgcaagatcaaaggtggcctctacctgtaagctaccgccaagagatcggcctatgtcccattagctagttggcgaggtaatagctcaccaaggcgacgatgggtagctggtctgagaggacgatcagccacactggaactgagacacggtccagactcctacgggaggcagcagtgaggaatattggtcaatgggcgagagcctgaaccagccaagtagcgtgcaggaagacggccctatgggttgtaaactgcttttataggggaataaagtgagccacgtgtggttttttgcatgtaccctatgaataaggaccggcta

SEQ ID NO: 9746 - DNA, 490 bp, unidentified
  misc_feature 1..490: note = Ascusbbf_1243638, encodes 16S rRNA
  source 1..490: mol_type = genomic DNA
agagtttgatcctggctcaggatggacgctggcggcgtgcctaacacatgcaagtcgaacgaggctcttccgactgatgattcgtctgaagacggaagatcaccgagtggcggatgggtgagtaacgcgtggagaacctgcccttatcagggggataacaactggaaacggttgacaataccgcataaagcaactgaccgcatgatcggttgcgaaaagatttatcggataaggatggctccgcgtcggattagctagttggtgaggtaacggcccaccaaggcgacgatccgtagccggcctgagagggcgaccggccacattgggactgagacacggcccagactcctacgggaggcagcagtggggaatattgcacaatgggcgcaagcctgatgcagcgacgccgcgtgagtgaagaagtatttcggtatgtaaagctctatcagcagggaagaaaatgacggtacctgcacaagaagccccggct

SEQ ID NO: 9747 - DNA, 490 bp, unidentified
  misc_feature 1..490: note = Ascusbbf_1679985, encodes 16S rRNA
  source 1..490: mol_type = genomic DNA
agagtttgatcctggctcaggacgaacgctggcggcgtgcttaacacatgcaagtcgagcggaaaggccctttcgggggtactcgagcggcgaacgggtgagtaacacgtgagtaatctgcccttcacttcgggataactaccggaaacggtggctaataccggatatgaccacgtctcgcatggggtgtggtggaaagcgtttagcggtgggggatgtgctcacggcctatcagcttgttggtgaggtagtggctcaccaaggcttcgacgggtagccggcctgagagggtgaccggccacactgggactgagacacggcccagactcctacgggaggcagcagtggggaatattggacaatgggcggaagcctgatccagcaacgccgcgtgagggatgacggccttcgggttgtaaacctctttcacctatgacgaagcgagagtgacggtagtaggagaagaagcaccggccaactacgtgccagc

SEQ ID NO: 9748 - DNA, 490 bp, unidentified
  misc_feature 1..490: note = Ascusbbf_1528671, encodes 16S rRNA
  source 1..490: mol_type = genomic DNA
agagtttgatcctggctcaggatgaacgctggcggcatgcctaagacatgcaagtcgtacgaggaggcccattgaaatggagtgattgcacaaagtggatttggattccctcctagtggcggaagggtgagaaatacgtaggttatttgcctcagagactgggataacatgcagaaatgcttgctaataccggatgataaatagaatggtacgttgttctattttaaaaggtgcctctaaagcaccactttgagagaagcctgcggcgtattagctagttggtgaggtaatggcccaccaaggcttcgatgcgtagccgacctgagagggtgatcggccacactgggactgagacacggcccagactcctacgggagacagcagttaggaatattcgtcaatgggggcaaccctgaacgagcaacgccgcgtgaaggaagaaggtcttcggattgtaaacttcttttatgagggacgaaggacgtgacgg

SEQ ID NO: 9749 - DNA, 490 bp, unidentified
  misc_feature 1..490: note = Ascusbbf_1542833, encodes 16S rRNA
  source 1..490: mol_type = genomic DNA
agagtttgatcctggctcagaacgaacgctgatggcgtgcctcatacatgcaagtcgagcgccccgcaaggggagcggcgaacgggtgagtaacgcgtgaacaatctgcctcaaagtgggggataaccattccaacggatggctaataccgcatagggtttggaagtggcatcacttctttacgaaagcatttatgcgctttgagatgagttcgcgtcccattagctagttggcggggtaacggcccaccaaggcaacgatgggtagccggcctgagagggtgtccggccacattgggactgagatacggcccagactcctacgggaggcagcagtagggaattttgcgcaatgggggaaaccctgacgcagcaacgccatgtgtgggatgaagcatttcggtgtgtaaaccactgtcggcagggaataaagcccacgtttacgtgggggtgaatgtacctgcagaggaagccccggctaacttcgtgcc

SEQ ID NO: 9750 - DNA, 490 bp, unidentified
  misc_feature 1..490: note = Ascusbbf_1372268, encodes 16S rRNA
  source 1..490: mol_type = genomic DNA
agagtttgatcctggctcaggacgaacgctggcggcatgcttcatacatgcaagtcgaacgataaggtctcttcggaggtacataagtggcggacgggtgagtaatatgtaggtaatctgccctagagagggggacaacagagggaaacttctgctaatacctcatatgagcgtacctgaaatggtattcttgaaaactccggtgccctctggggagccaacatctgattagctagttggcgggttaatggaccaccaagtcgacgatcagtagctggtttgagagtttgatcagccacaatgggacggggagacggcccaggctataccggaagacagcagaaaggaattttgcgcaatgggggatggcctaaggcagccatgccgcgggaacgtagaagcccatcggagtgtgacgttgtataagtagaggcgaattttgacggtacctacagaggaagcaccggctaactccgtgccagcagccgcg

SEQ ID NO: 9751 - DNA, 490 bp, unidentified
  misc_feature 1..490: note = Ascusbbf_1436436, encodes 16S rRNA
  source 1..490: mol_type = genomic DNA
agagtttgatcctggctcaggatgaacgccggcggcgtgcttaacacatgcaagtcgaacgaggtataagaacggaagttttcggacggaagatcttgtactgagtggcggacgggtgagtaacgcgtgggaaacctgccctgttccgggggataccagttggaaacgactgttaataccgcataagcgcacagcaccgcatggtgcagtgtgaaaaactccggtggaacaggatggtcccgcgtctgattaggcagttggcagggtaactgcctaccaaaccgacgatcagtagccggcctgggaaggggaacggcgaccttacgacggcgacacggaccaaactcctacgggaggcagcagtggggaatattgcacaataggggtaaccctgatgcggcgacgccgcgtgagggaagaagtatttcggtatggaaagctctatcagcagggaagaagatgacggtacctgcagaagcagccccggcta

SEQ ID NO: 9752 - DNA, 470 bp, unidentified
  misc_feature 1..470: note = Ascusbbf_1661871, encodes 16S rRNA
  source 1..470: mol_type = genomic DNA
agagtttgatcatggctcagaacgaacgctggcggcaggcttaacacatgcaagtcgaacgccccgcaaggggagtggcagacgggtgagtaacgcgtgggaatctacccagttctacggaacaacacagggaaacttgtgctaataccgtatacgccctacgggggaaagatttatcggaattggatgagcccgcgttggattagctagttggtgaggtaaaggctcaccaaggcgacgatccatagctggtctgagaggatgatcagccacacggggactgagacacggccccgactcctacgggaggcagcagctaagaatcttgcgcaatgggcgaaagcctgacgcagcaacgccgcgtgggggaggaaggccttcgggttgtaaaccccttttgtgagggaagaaattttgacggtacctcacgaataagccacggctaactacgtgccagcagccgcggtaat

SEQ ID NO: 9753 - DNA, 490 bp, unidentified
  misc_feature 1..490: note = Ascusbbf_898363, encodes 16S rRNA
  source 1..490: mol_type = genomic DNA
agagtttgatcctggctcagaacgaacgctggcggcaggcttaacacatgcaagtcgagcgatcccttcggggatagcggcggacgggtgagtaacgcgtgggaacgtgcccttttcttcggaatagcccagggaaacttggattaataccggatacgcccttcgggggaaagatttatcgggaaaggatcggcccgcgttggattagatagtaggcggggtaacggcccacctagtcgacgatcagtaggggttctgagaggaaggtcccccacattggaactgagacacggtccaaactcctacgggaggcagcagtgaggaatattggtcaatggacgagagtctgaaccagccaagtagcgtgaaggaagactgccctatgggttgtaaacttcttttgtttgggaataaagtgggccacgtgtggccttttgtatgtaccatacgaataagcatcggctaattccgtgccagcagccgcggtaat

SEQ ID NO: 9754 - DNA, 490 bp, unidentified
  misc_feature 1..490: note = Ascusbbf_822223, encodes 16S rRNA
  source 1..490: mol_type = genomic DNA
agagtttgatcatggctcaggatgaacgctagcggcaggcctaatacatgcaagtcgaacgggatccatgagtagcttgctacttatggtgagagtggcgcacgggtgcgtaacgcgtgagcaacctacccatatcagggggatagcccggagaaatccggattaataccgcatgcaaccattttgtggcatcataagatggttaaatatttataggatatggatgggctcgcgtgacattagctagttggtgaggtaacggctcaccaaggcaacgatgtctagggtctctgagaggagaatcccccacactggtactgagacacggaccagactcctacgggaggcagcagtaaggaatattggtcaatggagggaactctgaaccagccatgccgcgtgcaggatgactgccctatgggttgtaaactgcttttatcagggaataaatgttagtacgtgtactaatttgaatgtacctgaagaataa

SEQ ID NO: 9755 - DNA, 490 bp, unidentified
  misc_feature 1..490: note = Ascusbbf_990186, encodes 16S rRNA
  source 1..490: mol_type = genomic DNA
agagttgatcatggctcaggatgaatgctggcggcgtgcctaatacatgcaagtcgagcggtaacagggcttcaccgtgttcttgacgcacttggccatagagcaagtagctgatttcgaggacacagtgaagctgctgacgagcggcggacggctgagtaacgcgtgggaacggaccccaaactgagggataactagtcgaaagattagctaataccgcatgtgatcttcggattaaaggatttatccggtttgggactggcctgcgtacgattagatagttggtagggtaatggcctaccaagtcaacgatcgttagatggtttgagaagatgatcatccagactgggactgagacacggcccagactcctacgggaggcagcagtagggaatctttcacaatgggcgaaagcctgatggagcaacgccgcgtgcaggatgacggccttcgggttgtaaactgcttttataagcgagaaatatgatgg

SEQ ID NO: 9756 - DNA, 349 bp, unidentified
  misc_feature 1..349: note = Ascusbbf_600956, encodes 16S rRNA
  source 1..349: mol_type = genomic DNA
agagtttgatcatggctcaggatgaacgctggcggcgtgcttaacacatgcaagtaggtgatataagatggacccgcgttggattagtcagttggcagggtaacggcctaccaaagcgacgatccatagccggcctgagagggtgaacggccacattgggactgagacacggcccagactcctacgggaggcagcagtggggaatattgcacaatgggggaaaccctgatgcagcgacgccgcgtgaaggaagaagtatctcggtatgtaaacttctatcagcagggaagaaaatgacggtacctgactaagaagccccggctaactacgtgccagcagccgcggtaat

SEQ ID NO: 9757 - DNA, 480 bp, unidentified
  misc_feature 1..480: note = Ascusbbf_1373642, encodes 16S rRNA
  source 1..480: mol_type = genomic DNA
agagtttgatcctggctcagaacgaacgctggcggcaggcctaacacatgcaagtcgaacgtgaagcatccttcgggatgtggaaagtggcagacgggtgagtaacgcgtgggaatttacctaatggtacgggatagctcagggaaacttggatcaataccgtataagccctccgggggaaagatttatcgccattagagaagcccgcgttagattagcttgttggtgaggtaacggctcaccaaggcgacgatctatagctggtctgagaggatgatcagccacactgggactgagacacggcccagactcctacgggaggcagcagtggggaatattgcacaatgggcgaaagcctgatgcagccatgccgcgtgagtgacgaaggccttagggttgtaaagctctttcaccggtgaagataatgacggtagccggagaagaagccccggctaactccgtgccagcagccgcggtaat

SEQ ID NO: 9758 - DNA, 490 bp, unidentified
  misc_feature 1..490: note = Ascusbbf_467461, encodes 16S rRNA
  source 1..490: mol_type = genomic DNA
agagtttgatcatggctcaggatgaacgctagctacaggcttaacacatgcaagtcgaggggcagcatgaaagtagcttgctacttttgatggcgaccggcgcacgggtgcgtaacgcgtatccaactttcccgttactctcggatagccttccgaaagggagattaatacgagatggtgtctttatttcgcatgttatgaagactaaagatttattggtaacggatagggatgcgtgacattagatagttggcggggtaacggcccaccaagtccacgatgtctaggggttctgagaggaaggtcccccacactggaactgagacacggtccagactcctacgggaggcagcagtgaggaatattggtcaatggccgagaggctgaaccagccaagtagcgtgaaggatgaaggttctatggattgtaaacttcttttatacgggaataacatcacctacgtgtaggtgcctgcatgtaccgtatgaat

SEQ ID NO: 9759 - DNA, 488 bp, unidentified
  misc_feature 1..488: note = Ascusbbf_1347039, encodes 16S rRNA
  source 1..488: mol_type = genomic DNA
agagtttgatcctggctcaggacgaacgctggcggcgtgcttaacacatgcaagttgagcgggaatagttgatagcttgctattgactatgagagcagcgcactggtgagtaacacgtgggaacataccttttggtgggggacaacagagggaaacttctgctaataccgcataagccctaagggggaaagattaattgccgaacgattggcccgcggaagattaggtagtaggtggggtaacggcctacctagccgacgatctatagctggtctgagaggacgaacagccacattggaactgagacacggtccagactcctacggggggcagcaggggggaatattgggcagtggaggcaactctgacacagccatgccgcgtgagtgaagaaggttttcggagtgtaaagctctttcagacgggaagatgatgacggtaccgtcagaagaagcaccggctaacttcgtgccagcagccgcggtaat

SEQ ID NO: 9760 - DNA, 472 bp, unidentified
  misc_feature 1..472: note = Ascusbbf_1440192, encodes 16S rRNA
  source 1..472: mol_type = genomic DNA
agagtttgatcctggctcaggatgaacgctagctacaggcttaacacatgcaagtcgaacgcatgccttttggcatgagtggcgcacgggtgagtaccgcgtgggaaccgaccctggggttggggataaccgctggaaacggcggctaatacccgatacgccttacgagggaaagatttattgcccttggacgggcccgcgttggattaggtagttggtggggtaacggcctaccaagcctgcgatccatagctggtttgagaggatgatcagccacactgggactgagacacggcccagactcctacgggaggcagcagtggggaatattggacaatgggggcaaccctgatccagccatgccgcgtgagtgaagaaggccttagggttgtaaagctctttcagtggtgaagatgatgacggtagccacagaagaagccccggctaactccgtgccagcagccgcggtaat

SEQ ID NO: 9761 - DNA, 490 bp, unidentified
  misc_feature 1..490: note = Ascusbbf_1655099, encodes 16S rRNA
  source 1..490: mol_type = genomic DNA
agagtttgatcctggctcaggatgaacgctggcggcgtgcctaatacatgcaagtcgaacggagcaccttggtgctaagtggcgaacgggtgaggagaacataggtaacctgcccctccgagggggacaacagctggaaacggctgctaagaccgcatagacgcattcagggcatcctggatgcgctaaatgaccggatggtcagcggggggatggacctatgcagtattagctagttggcggggcaacggcccaccaaggcgacgatacttagccggcctgagagggcggacggccacactgggactgagacacggcccagactcctacgggaggcagcagctaaggatcttccgcaatgggcgaaagcctgacggagcgacgccgcgtgagtgaggaagtatttcggtatgtaaagctctatcagcagggaagaaaatgacggtacctgactaagaagccccggctaactacgtgccagcagccgcgg

SEQ ID NO: 9762 - DNA, 469 bp, unidentified
  misc_feature 1..469: note = Ascusbbf_1705376, encodes 16S rRNA
  source 1..469: mol_type = genomic DNA
agagtttgatcatggctcagattgaacgctggcggcaggcctaacacatgcaagtcgaacgaagtcttcggacttagtggcgcacgggtgagtaacacgtgggaacatacctttcggtgggggataacatcgggaactgatgctaataccgcatacgccccttgggggaaagatttatcgccgaaagattggcccgcgtccgattagctagttggtgaggtaacggctcaccaaggctccgatcggtagctggtctgagaggatgaccagccacactgggactgagacacggcccagactcctacgggaggcagcagtggggaatattggacaatgggcgcaagcctgatccagccatgccgcgtgagtgatgaaggccttagggttgtaaagctctttcacccacgacgatgatgacggtagtgggagaagaagccccggctaacttcgtgccagcagccgcggtaat

SEQ ID NO: 9763 - DNA, 468 bp, unidentified
  misc_feature 1..468: note = Ascusbbf_1444829, encodes 16S rRNA
  source 1..468: mol_type = genomic DNA
agagtttgatcctggctcagaacgaacgctggcagcaggcttaacacatgcaagtcgagcgcgtagcaatacgagcggcagacgggtgagtaacgcgtgggaatctaccccttactacggaataacgcagggaaacttgtgctaataccgtatgtggccgagaggcgaaagatttatcggtaagggatgagcccgcgttggattagctagttggtggggtaaaggcctaccaaggcgacgatccatagcaggcctgagaggatgatcagccacactgggactgagacacggcccagactcctacgggaggcagcagtggggaatattggacaatgggcgcaagcctgatccagccataccgcgtgagtgatgaaggccctagggttgtaaagctctttcaccggtgaagataatgacggtaaccggagaagaagccccggctaacttcgtgccagcagccgcggtaat

SEQ ID NO: 9764 - DNA, 490 bp, unidentified
  misc_feature 1..490: note = Ascusbbf_1666566, encodes 16S rRNA
  source 1..490: mol_type = genomic DNA
agagtttgatcctggctcaggacgaacgctggcggcgtgcctaacacatgcaagtcgaacgagaagtcttttaatgattccttcggggagatttaaaagatggacagtggcggacgggcgagtaacgcgtgagtaacctgcccataagtgagggatagcccatggaaacgtggagtaatacctcatattgtatactggtcacatgacctatatatgaaagatttatcgcttatggatggactcgcgtctgattagatagttggtgaggtaacggctcaccaagtcgacgatcagtagccgaactgagaggttgatcggccgcattgggactgagacacggcccagactcctacgggaggcagcagtggggaatattgcgcaatgggggaaaccctgacgcagcaacgccgcgtgcaggaagaaggtcttcggattgtaaactgttgtcgcaagggaagaagacagtgacggtaccttgtgagaaagtcac

SEQ ID NO: 9765 - DNA, 490 bp, unidentified
  misc_feature 1..490: note = Ascusbbf_1111366, encodes 16S rRNA
  source 1..490: mol_type = genomic DNA
agagtttgatcctggctcaggacgaacgctggcggcgggcttaacacatgcaagtcgaaggagaaggaaggcgcttgcgccttctggagactggcggacgggtgagtaacgcgtagataacctgcctatacctgggggataacatctcgaaagaggtgctaataccgcataatgcagcggggccgcatggccacagttgttaaaggtttcggccgggtatagaggggtctgcgtgctattagttagttggtgaggtaacggctcaccaaggcgatgatagctagggggtctgagaggatgatcccccacactgggactgagacacggcccagactcctacgggaggcagcagtgaggaatattggtcaatgggcgagagcctgaaccagccaagtagcgtgcaggatgacggccctatgggttgtaaactgcttttgtatggggataaagtgctccacgtgtggagttttgtaggtaccatacgaataag

SEQ ID NO: 9766 - DNA, 490 bp, unidentified
  misc_feature 1..490: note = Ascusbbf_1778973, encodes 16S rRNA
  source 1..490: mol_type = genomic DNA
agagtttgatcatggctcaggacgaacgctggcggcgtgcttaacacatgcaagtcgaacgctgaagcatcttcgggtgtggatgagtggcgaacgggtgagtaacacgtgggtaatctgccctgcactctgggataagccttggaaacggggtctaataccggatacgacacatggaggcatcttcgtgtgtggaaagctccggcggggggggatgggcccgcggcctgttagctagttggcggggcaacggcccaccaaggcgactatgggtagctgggttgagagaccgaccagccagattgggactgagacacggcccagactcctacgggaggcagcagtggggaatcttgcgcaatgggcggaagcctgacgcagcgacgccgcgtgcgggaggaaggccctcgggtcgtaaaccgctttcagcagggacgaggccgcaaggtgacggtacctgcagaagaagccccggctaactacgtgccag

SEQ ID NO: 9767 - DNA, 490 bp, unidentified
  misc_feature 1..490: note = Ascusbbf_1293041, encodes 16S rRNA
  source 1..490: mol_type = genomic DNA
agagtttgatcctggctcaggacgaacgctggcggcgggcttaacacatgcaagtcgaacgctccctttggggagagtggcgcacgggtgagtaacgcgtaggcaatctacccccagctggggaataacccatcgaaagatgggctaataccgcataacgtcggatggtcgcatggccgaccgaccaaagttcaggcggctggggatgagcctgcgttggattagcttgttggtagggtaacggcctaccaaggcgacgatccatagcgggtctgagaggatgatccgccacactggcactgggacacgggccagactcctacgggaggcagcagtgaggaatattgcgcaatggacgaaagtctgacgcagccacgccgcgtgcaggaagacacccctctggggcgtaaactgcttttgtgtgagaagaacaccccgttctgcggggtctgacggtatcgcacgaataaggaccggctaactccgtgcc

SEQ ID NO: 9768 - DNA, 490 bp, unidentified
  misc_feature 1..490: note = Ascusbbf_1900212, encodes 16S rRNA
  source 1..490: mol_type = genomic DNA
agagtttgatcatggctcaggatgaacgctggcggcgtgcctaacacatgcaagtcgaacggggcccgtggcgctcccctttggggaggggcaggggctgagtggcggacgggtgagtaacgcgtgggtaacctgccctgtacagggggataacagccggaaacggctgctaataccgcataagcgcggggggcggcatcgctccccgcggaaaactccggtggaacaggatggtcccgcgtctgattaggcagttggcagggtaacggcctaccgaaccgacgatcagtagccggcctgagagggtgaacggccacattgggactgagacacggcccaaactcctacgggaggcagcagtggggaatattgcacaatggggggaaccctgatgcagcgacgccgcgtgagtgaagaagtatttcggtatgtaaagctctatcagcagggaagaagatgacggtacctgcagaagcagccccggctaact

SEQ ID NO: 9769 - DNA, 490 bp, unidentified
  misc_feature 1..490: note = Ascusbbf_1371514, encodes 16S rRNA
  source 1..490: mol_type = genomic DNA
agagtttgatcatggctcaggatgaacgctagcggcaggcttaacacatgcaagtcgaggggcagcgcggggtagcaatactctggcggcgaccggcggaagggtgcgtaacgcgtgagcaacttgcccgtcactgggggataggcactggaaacggtgtgtaatactccataacatatggattcacatggatttatattgaaagattcgttggtgacggatgggctcgcgtaacattagctagtcggcggggtaacggcccaccgaggctacgatgtttaggggttctgagaggaaggtacaccacactggaacacagacacggtccagagtcgtaagggaggaagaagtgagtaatattggtcaatgggcggaagcctgaactagcaatgccgcgtgcaggaataaggccctatgggtagtaaactgcttgtccttgagggaaataagggtcacgtgtggcccgatgagagtatcaggggaataagca

SEQ ID NO: 9770 - DNA, 405 bp, unidentified
  misc_feature 1..405: note = Ascusbbf_580215, encodes 16S rRNA
  source 1..405: mol_type = genomic DNA
agagtttgatcctggctcagggatagccttccgaaagaaagattaatacctgatggtctcgtgtcgggacatcccgttgcgagtaaagattcatcggcgatggatggggatgcgtccgattagcttgtaggcggggtgacggcccaccaaggcgacgatcggtaggggctctgagaggagggtcccccacactggaactgagacacggtccagactcctacgggaggctgcagtgaggaatattggtcaatgggcgagagcctgaaccagccaagtggcgtgagggatgacggccctacgggttgtaaacctcttttgtttgggaataaagtgggccacgcgtggccttttgtatgtacctttcgaataagcatcggctaattccgtgccagcagccgcggtaat

SEQ ID NO: 9771 - DNA, 490 bp, unidentified
  misc_feature 1..490: note = Ascusbbf_1324449, encodes 16S rRNA
  source 1..490: mol_type = genomic DNA
agagtttgatcctggctcaggatgaacgctagctacaggcttaacacatgcaagtcgaggggcagcgcggggtagcaatactttggcggcgaccggcgggagggtgcgtaacgcgtgagcaacttgcccgccactgggggataggcactggaaacggtgtgtaatactccataacatatggattcacatggattcatatggaaagattcgttggtgacggatgggctcgcgtaacattagctagtcgtcgtggtaacggcccaccgcagctacgctgtgtaggggttctgagaggaaggtcccccacattggaagtgagacacggtccagactcctacgggaggcagcagtgaggaatattggtcaatgggcggaagcctgaaccagccatgccgcgtgcaggaataaggccctatgggtcgtaaactgcttttccttgagggcaataaggatcacgtgtggttcgatgagagtatcaggggaataagca

SEQ ID NO: 9772 - DNA, 490 bp, unidentified
  misc_feature 1..490: note = Ascusbbf_1440672, encodes 16S rRNA
  source 1..490: mol_type = genomic DNA
agagtttgatcatggctcaggatgaacgctggcggcgtgcttaacacatgcaagtcgaacggaccaaaaggagcttgctccttgcggttagtggcggatgggtgagtaacgcgtgggtaatctgccttatacaaagggataactcagagaaatctgtgctaaaaccttataagcttacacgatcatatgatcgagtaagaaaaactttagtggtataagatgagcccgcgtccgattagctagttggtgagataatggctcaccaaggcaacgatcggtagccggcctgagagggtgaacggccacactgggactgagacacggcccagactcctacgggaggcagcagtggggaatattgcacaatggggggaaccctgatgcagcaacgccgcgtgaaggatgaaggttttcggattgtaaactattgtctgcagggaagaataaagactgtacctgcaaagaaagctccggctaactacgtgccagc

SEQ ID NO: 9773 - DNA, 490 bp, unidentified
  misc_feature 1..490: note = Ascusbbf_1267999, encodes 16S rRNA
  source 1..490: mol_type = genomic DNA
agagtttgatcatggctcaggatgagcgctgacggcgtgcctaacacatacaaatcaaacggaaaggattcttcggaattctttcagtgacggacggatgaataacgcatgggtaacctgccccatacagaggaacaacagctgaaaacggctgctaataccacataagcgcacaatgctgcatggtacagtgtaaaaaaattttatcggtatgggatggacccgcgtctgattagctagttggagaggtaacggcccaccaaggcgacaatcagtagccgacctgagagggtgaccggccacattggaactgagacacggcccaaactcctacaggaggcaacaataaaggatattgcacaatgggcgaaagcctgatgcagcgacgccgcgtgagtgaggaagtatttcggtatgtaaagctctatcagcagggaagaaaatgacggtacctgactaagaagccccggctaactacgtgccagcagcc

SEQ ID NO: 9774 - DNA, 490 bp, unidentified
  misc_feature 1..490: note = Ascusbbf_1324389, encodes 16S rRNA
  source 1..490: mol_type = genomic DNA
agagtttgatcctggctcagattgaacgctagcggaatgctttacacatgcaagtcgaacggcagcgcaagagagcttgctctctggcggcgagtggcgaacgggtgagtaatgcatcggaacgtgcccagtagcgggggataactacgcgaaagcgtggctaataccgcatacgccctacgggggaaagggggggattcttcggaacctctcactattggagcggccgatgtcggattagctagttggtggggtaaaggcctaccaaggcgacgatccgtagctggtttgagaggacgacaggccacactggaacggagacacggccaagactcctacgggaggcagcagtggggaattttggacaatgggggcaaccctgatccagccatgccgcgtgtgtgatgaaggccttcgggttgtaaagcacttttggcagagaagaaatggtttgggttaataccctgaatcgatgacggtatctgcagaa

SEQ ID NO: 9775 - DNA, 490 bp, unidentified
  misc_feature 1..490: note = Ascusbbf_1410728, encodes 16S rRNA
  source 1..490: mol_type = genomic DNA
agagtttgatcctggctcaggacgaacgctggcggcgtgcttaacacatgcaagtcgaacgctgaagcccacttcggtgggtggatgagtggcgaacgggtgagtaacacgtggacaatctgccctgcacttcgggataagccttggaaacgaggtctaataccgaataggacactgcatcgcatggtgtggtgtggaaagcgtttaatgcggtgtgggatgagtccgcggcctatcagcttgttggtggggtgatggcctaccaaggcgacgacgggtagccggcctgagagggtgaccggccacactgggactgagacacggcccggactcctacgggaggcagcagtggggaatattgcacaatgggggaaaccctgatgcagcgacgccgcgtgagtgaagaagtatttcggtatgtaaagctctatcagcaaggaagataatgacggtacttgactaagaagccccggctaactacgtgccagca

SEQ ID NO: 9776 - DNA, 490 bp, unidentified
  misc_feature 1..490: note = Ascusbbf_997233, encodes 16S rRNA
  source 1..490: mol_type = genomic DNA
agagtttgatcctggctcaggatgaacgctagcgggaggcttaacacatgcaagccgagggatattgtgctttcgggcacaagagaccggcggacgggtgagtaacatgtatgcaacttgcctctatcagtgggataacccggggaaactcggactaataccgcataacaatattatcagcattgatgatatttaaaagatttatcggatagagataggcatgcgtaggattagttagttggtgaggtaaaggctcaccaagacgatgatccttagggggcctgagagggtgatcccccacactggtactgagacacggaccagactcctacgggaggcagcagtgaggaatattggacaatgggtgagagcctgatccagccatcccgcgtgcaggaagacggccctatgggttgtaaactgcttttatacaggaataaaccattttacgagtaggatgttgaaggtactgtatgaataagcatcggct

SEQ ID NO: 9777 - DNA, 490 bp, unidentified
  misc_feature 1..490: note = Ascusbbf_515327, encodes 16S rRNA
  source 1..490: mol_type = genomic DNA
agagtttgatcatggctcaggacgaacgctggcggcgtgcctaatacatgcaagtcgagcggattgatgggagcttgctccctgatatcagcggcggacgggtgagtaacacgtgggcaacctgcctatacgactgggataacttcgggaaaccggagctaataccggataatccctttcctctcatgaggaaaggctgaaagatggcttttcgctatcacttatagatgggcccgcggcgcattagctagttggtgaggtaacggctcaccaaggcaacgatgcgtagccgacctgagagggtgatcggccacactgggactgagacacggcccagactcctacgggaggcagcagtagggaattttgcgcaatgggcgaaagcctgacgcagcaacgccgcgtgatcgtagaagcccttcggggtgtaaagatctgtcagtagggacgaacaatgactgtacctacagaggaagcaccggctaactcc

SEQ ID NO: 9778 - DNA, 490 bp, unidentified
  misc_feature 1..490: note = Ascusbbf_691089, encodes 16S rRNA
  source 1..490: mol_type = genomic DNA
agagtttgatcctggctcaggataaacgctggcggcgtgcatgagacatgcaagccgaacgaaggatcgggcttgctcgatccttagtggcggacggctgagtaacgcgtaggtgacctaccccgaagtggggaataactgcccgaaagggtggctaataccgcatgtggtcgcacgttcattcgtgcgagtaaagccgcaaggcgcttcgggaggggcctgcgtccgattagctcgttggtggggtaatggcttaccaaggcgacgatcggtaggtggtctgagaggacgatcacccagactgggactgagacacggcccagactcctacgggaggcagcagtcgggaattttgctcaatgggggaaaccctgaagcagcaacgccgcgtgagggatgaaggccttcgggttgtaaacctcttttgtcagggacgatgatgacggtacctggcgaataagccacggctaactacgtgccagcagccgcg

SEQ ID NO: 9779 - DNA, 490 bp, unidentified
  misc_feature 1..490: note = Ascusbbf_1373002, encodes 16S rRNA
  source 1..490: mol_type = genomic DNA
agagtttgatcctggctcaggatgaacgctagcggcaggcttaacacatgcaagtcgaggggtaacgcggggtagcaatactctggcgacgaccggcgcacgggcgcgtaacgcgtatgcaacctacctgtaacaggggtataacggagagaaatttccactaatcccccatattgttagagattcgcatgtttctctaacgaaagcttcgttggttacggttgggcaggcgtgacattagctagttggtaaggtaacgacttaccaaggcgacgatgactaggggagctgagtggcttatcccacgaatgggaacgggaaaacgtaccagcgtcctaggggaggaggaggggaggaaaatgggtcaatggacggagctcggaaccggccaggaggcgtggaggaagaagggcctatgggtggtaaactccttttgttcgagagtaataagaggcttgcgagcctagaggagagtatcggacgaataagc

SEQ ID NO: 9780 - DNA, 490 bp, unidentified
  misc_feature 1..490: note = Ascusbbf_1246230, encodes 16S rRNA
  source 1..490: mol_type = genomic DNA
agagtttgatcctggctcaggacgaacgctggcggcgtgcttaacacatgcaagtcgagcggtaaggcccttcggggtacacgagcggcgaacgggtgagtaacacgtgagcaacctgcccctgactccgggataagcggtggaaacgccgtctaataccggatacgaccccccggatcatgccggagggtggaaagtttctcggttggggatgggctcgcggcctatcagcttgttggtggggtaaaggcctaccaaggcgattacgggtagccggcctgagagggtgaccggccacactgggactgagacacggcccagactcctgcgggaggcagcagtgaggaatattggtcaatgggcgtaagcctgaaccagccaagtagcgtgcaggatgacggccctatgggttgtaaactgcttttatgcggggataaagtcacctacgtgtaggtgtttgtaggtaccgcatgaataaggaccggctaat

SEQ ID NO: 9781 - DNA, 490 bp, unidentified
  misc_feature 1..490: note = Ascusbbf_1038556, encodes 16S rRNA
  source 1..490: mol_type = genomic DNA
agagtttgatcctggctcaggatgaacgctggcggcgtgcttaacacatgcaagtcgaacgaggtacaaggacggaagccttcggacggaagatcttgtactgagtggcggacgggtgagtagcgcgtgggaaacctgccctgttccgggggataccagttggaaacgactgttaataccgcataagcgcacagcaccgcatggtgcagtgtgaaaaactccggtggaacaggatggtcccgcgtctgattaggcagttggggaggtaacggctcaccaaaccgatgatctctagctggtttgagaggacaatcagccacattggaattgggaaacggtccaaactcctacgggaggcagcagtggggaatattgcacaatgggggaaaccctgatgcagcgacgccgcgtgagtgaagaagtatttcggtatgtaaagctctatcagcagggaagaaaatgacggtacctgactaagaagccccggcta

SEQ ID NO: 9782 - DNA, 490 bp, unidentified
  misc_feature 1..490: note = Ascusbbf_1766882, encodes 16S rRNA
  source 1..490: mol_type = genomic DNA
agagtttgatcatggctcaggatgaacgctggcggcgtgcttaacacatgcaagtcgaacgaagcacttaagattgactcttcggatgacgtcttttgtgacttagtggcggacgggtgagtaacgcgtgggtaacctgcctcacacagggggataacagttagaaatgactgctaataccgcataacccgataggatcgcatgatccagacggaaaagatttatcggtgtgagatggacccgcgtctggttagctagttggcggggcaacggcccaccaaggcgactatgggtagctgggttgagagaccgaccagccagattgggactgagacacggcccagactcctacgggaggcagcagtggggaatattgcacaatggaggaaactctgatgcagcgacgccgcgtgagcgatgaagtatttcggtatgtaaagctctatcagcagggaagataatgacggtacctgactaagaagcaccggct

SEQ ID NO: 9783 - DNA, 468 bp, unidentified
  misc_feature 1..468: note = Ascusbbf_1006942, encodes 16S rRNA
  source 1..468: mol_type = genomic DNA
agagtttgatcctggctcagaacgaacgctggcggcaggcctaacacatgcaagtcgaacgatccttcgggatagtggcgcacgggtgcgtaacgcgtgggaatatgcccttgggtgcggaataacgtatggaaacgtacgctaataccgcataatgactccggtccaaagatttatcgcccaaggattagcccgcgttagattagctagttggtgaggtaatggctcaccaaggcgacgatctatagggggtctgagaggatgatcccccacactgggactgagacacggcccagactcctacgggaggcagcagtgaggaatattggacaatggaggaaactctgatccagccatgccgcgtgtatgaagaaggccttagggttgtaaagtactttcaaacgtgaagataatgacggtagcgttagaagaagctccggctaaattcgtgccagcagccgcggtaat

SEQ ID NO: 9784 - DNA, 488 bp, unidentified
  misc_feature 1..488: note = Ascusbbf_1445312, encodes 16S rRNA
  source 1..488: mol_type = genomic DNA
agagtttgatcatggctcagaacgaacgctggcggcaggcttaacacatgcaagttgagcgggattaattgatagcttgctattaattatgagagcagcgcactggtgagtaacacgtgggaacataccttttggtgggggacaacagttggaaacgactgctaataccgcataagccctaatggggaaaggttaattgccgaacgattgacccgcggaagattaggtagtaggtgtggtaacgtcctacctagccgacgatctctagctggtctgagaggacaagcagccacatttgaactgcgacacggtccaggatcctacgggaggcagcagggaggaatattgggcaatggaggaaactctgacccagccatgccgcgtgagtgaagaaggttttcggattgtaaagctctttcagacgggaagatgatgacggtaccgtcagaagaagcaccggctaactccgtgccagcagccgcggtaat

SEQ ID NO: 9785 - DNA, 490 bp, unidentified
  misc_feature 1..490: note = Ascusbbf_1104086, encodes 16S rRNA
  source 1..490: mol_type = genomic DNA
agagtttgatcctggctcagggtgaacgctagctacaggcttaacacatgcaagtcgaggggtaacgacagcgaaagcttgcttttgctgggcgacgaccggcgcacgggtgagtaacgcgtatccaacctgcccataactaagggataatccgtagaaatgcggtctaataccttatgtgttccgacgaggacatctgaattggaataaagatttatcggttatggatggggatgcgtctgattagattgttggcggggcaacggcccaccaaggcgatgatggatagccgggttgagagaccgaccggccagattgggactgagacacggcccagactcctacgggaggcagcagtggggaatcttgcacaatgggcgaaagcctgatgcagcgacgccgcgtgcgggaaggaggccctcgggtcgtaaagctctgttgtcggggacgaatgttgaggcctagaacataggtttcaaatgacggtacc

SEQ ID NO: 9786 - DNA, 479 bp, unidentified
  misc_feature 1..479: note = Ascusbbf_1334658, encodes 16S rRNA
  source 1..479: mol_type = genomic DNA
agagtttgatcctggctcaggatgaacgctggcggcgtgcctaatacatgcaagtcgagcggtaaggccacttcggtggtacacgagcggcggacggctgagtaacacgtaggaacgtaccccaaactgagggataactgctcgaaagagtagctaataccgcatgtgatcttcggattaaagctacggcggtttgggaacggcctgcgcatgattagcttgttggtgaggtaatggctcaccaaggcgacaatcattagctggtctgagaggatgatcagccagactgagactgagaacggcccagactcctacgggaggcagcagtagggaattttccacaatgggcgaaagcctgatggagcaacgccgcgtgcaggatgaaggccttcgggttgtaaactgcttttatatgtgacgattatgacggtagcatatgaataaggatcggctaactccgtgccagcagccgcggtaat

SEQ ID NO: 9787 - DNA, 490 bp, unidentified
  misc_feature 1..490: note = Ascusbbf_1777811, encodes 16S rRNA
  source 1..490: mol_type = genomic DNA
agagtttgatcatggctcaggatgaacgctagcggcaggcttaacacatgcaagtcgaggggcagcggggctgagtgcttgcactcggccgccggcgaccggcgcacgggtgagtagcacgtatgcaacctgccccggagcgggggataacccggcgaaagccggactaataccgcgtacatatctgaaaggcatctttcagataggaaaggacctcggtccgctccgggatgggcatgcggcgcattaggcagacggcggggtaacggcccaccgtaccgacgatgcgtaggggttctgagaggaaggccccccacactggtactgagacacggaccagactcctacgggaggcagcagtgaggaatattggtcaatgggcggaagcctgaaccagccatgccgcgtgcaggaatgaggccctacgggtcgtgaactgcttttcgcgcggagcaataaggggggttcgcccccccgatgagagtacgcg

SEQ ID NO: 9788 - DNA, 490 bp, unidentified
  misc_feature 1..490: note = Ascusbbf_1043569, encodes 16S rRNA
  source 1..490: mol_type = genomic DNA
agagtttgatcatggctcaggacgaacgctggcggcgtgcttaacacatgcaagtcgaacgagacgatttagaagcttgcttttaaagagtcgagtggcaaacgggtgagtaacgcgtagacaacctgccgcaaagatggggacaacagtccgaaaggactgctaataccgaatgttgtatcttttccgcatggaaggggtattaaagatggcctctacttgtaagctatcgcctgaagaggggtttgcgtctgattaggcagttggtgaggtaacggcccaccaaacctacgatcagtagccggtctgagaggatggacggccatactggaactgagacacggcccagactcctacgggaggcagcagtggggaatcttccgcaatgggcgaaagcctgacggagcaacgccgcgtgaaggatgaaggttttcggattgtaaacttcttttattaaggacgaataatgacggtacttaatgaataagct

SEQ ID NO: 9789 - DNA, 490 bp, unidentified
  misc_feature 1..490: note = Ascusbbf_1561127, encodes 16S rRNA
  source 1..490: mol_type = genomic DNA
agagtttgatcctggctcaggataaacgctggcggcgtgcataacacatgcaagtcgaacgatgaaacttagatgatttcttcggaatgaacttaagtggattagtggcgaacgggtgagtaacacgtgagtaacctgccttacacaaggggatagcctctggaaacggagaataataccctataaagtctaatcagcacatgctggaaagaccaaagatttatcggtgtaagatggacttgcgtctgattagctagttggtgagataaaagctcaccaaggcgacgatcagtagccggctggagagagtgtacggccacattgggactgagacacggcccaaactcctacgggaggcagcagtggggaattttgcacaatgggggaaaccctgatgcagcgacgccgcgtgatttagaaggccttcgggttgtaaaaatcttttttacgggatgaaaatgacagtaccgtaagaataaggtccggctaa

SEQ ID NO: 9790 - DNA, 187 bp, unidentified
  misc_feature 1..187: note = Ascusbbf_494984, encodes 16S rRNA
  source 1..187: mol_type = genomic DNA
agagtttgatcatggctcagatgatcagcccgcaatacgccacggcggattcctgcggttgtcgccggcccggtacagacagatctggttgccggatgggtccgtgaggcgagcctcccgccagagccagcgctgatcgatcgggtgctgcgtgaattcgattccggccgccagcagccgcggtaat

SEQ ID NO: 9791 - DNA, 490 bp, unidentified
  misc_feature 1..490: note = Ascusbbf_1522995, encodes 16S rRNA
  source 1..490: mol_type = genomic DNA
agatttgatcctggctcaggatgaacgctagctacaggcttaacacatgcaagtcgaggggcagcaggacgatagcttgctattgttgctggcgaccggcgcacgggtgagtaacgcgtatccaaccttccccttagttgggcatagcccggcgaaagtcggattaataccctatgttcttcgtagaggacttctgaaatgaagcaaagatttatcgctaagggatggggatgcgtctgattaggtagtaggcggggtaacggcccacctagcctacgatcagtaggggttctgagaggaaggtctcccacattggtactgagacacggaccaaactcctacgggaggcagcagtgaggaatattggtcaatgggcgtaagcctgaaccagccaagtagcgtgcaggatgacggccctatgggttgtaaactgcttttgtcggggagcaataagggttacgtgtagcccgatgagagtacctggcgaata

SEQ ID NO: 9792 - DNA, 490 bp, unidentified
  misc_feature 1..490: note = Ascusbbf_1093929, encodes 16S rRNA
  source 1..490: mol_type = genomic DNA
agagtttgatcatggctcaggacgaacgctggcggcgtgcttaacacatgcaagtcgaacgagaatctgtggatcgaggattcgtccaagtgaagcagaggacagtggcggacgggtgagtaacgcgtgagcgacctaccttagacagggggacaacagttggaaacgactgctaataccgcataagaccacgatgtcgcatggcattgaggtaaaaggagcaatccggtttaagatgggctcgcgtctgattagctggttggtggggtaacggcctaccaaggcgacgatcagtagccgacctgagagggtgatcggccacactggaactgagacacggtccagactcctacgggaggcagcagtggggaatattgggcaatgggcgaaagcctgacccagcaacgccgcgtgaaggaagaaggtcttcggattgtaaacatctgtcctgtgggacgaacaaatgacggtaccacaggaggaagccccg

SEQ ID NO: 9793 - DNA, 490 bp, unidentified
  misc_feature 1..490: note = Ascusbbf_620130, encodes 16S rRNA
  source 1..490: mol_type = genomic DNA
agagtttgatcatggctcaggatgaacgctagctacaggcttaacacatgcaagtcgaggggcagcattatcgaagcttgctttgatagatggcgaccggcgcacgggtgagtaacgcgtatccaaccttccccatagtagggcatagcccgtagaaatgcggattaataccctatgtattccgaggatgacatctgattcggaacaaaggttcaccgctatgggatggggatgcgtctgattaggtagtaggcggggtaacggcccaccaaagcgacgatcagtagccggcctgagagggcggacggccacattgggactgagacacggcccaaactcctacgggaggcagcagtggggaatattgcacaatgggggaaaccctgatgcagccatgccgcgtgtgtgaagaaggccttcgggttgtaaagcacttttgcattcgaggaagacagcgcgtaaataaacgcgttatttgacgttagagtgt

SEQ ID NO: 9794 - DNA, 490 bp, unidentified
  misc_feature 1..490: note = Ascusbbf_1503029, encodes 16S rRNA
  source 1..490: mol_type = genomic DNA
agagtttgatcctggctcaggatgaacgctggcggcgtgcctaacacatgcaagtcgaacggtcctcgcaagaggacagtggcgcacgggtgaggaacacgtagctgacctgcctcagagtgcgggataacgccccgaaaggggtgctaataccgcgtaagctcacgggttttagagacctgggagaaaaggccttcgggtcgctttgagagggggctgcggcgcatcaggtagttggtggggtaacggcctaccaagccaacgacgcgtagggggtctgagaggatgatcccccacactgggactgagacacggcccagactcctacgggaggcagcagtgagggatattgcacaatgggggaaaccctgatgcagcgacgccgcgtgggcgatgaaggtcttcggatcgtaaagccctttttgaggtgacgagcaaggacggtagcctcagaataagtctcggctaactacgtgccagcagccgcggt

SEQ ID NO: 9795 - DNA, 490 bp, unidentified
  misc_feature 1..490: note = Ascusbbf_1426121, encodes 16S rRNA
  source 1..490: mol_type = genomic DNA
agagtttgatcctggctcaggatgaacgctagcggcaggcttaacacatgcaagtcgaggggcagcgggatgtagcaatacattgccggcgaccggcgcaagggtgcgtaacgcgtgagtaacatgcccgtatcaggaggataacccggagaaatccggactaatactgcataatattgtttagaggcatctttggacaattaaagtttcgacggatacggattggctcgcgtgacattagctagatggtaaggtaacggcttaccatggcgacgatgtctaggggttctgagaggaaggtcccccacactggaactgagacacggtccaaactcctacgggaggcagcagtgaggaatattggtcaatggtcgagagactgaaccagccaagtagcgtgaaggaagactgccctatgggttgtaaacttcttttgtttgggaataaagtgggccacgtgtggccttttgtatgtaccatacgaataagc

SEQ ID NO: 9796 - DNA, 490 bp, unidentified
  misc_feature 1..490: note = Ascusbbf_1636529, encodes 16S rRNA
  source 1..490: mol_type = genomic DNA
ctcttttgctcctttctccttcttccctctctctccctgcttcccccatgcaagtcgaggggcatcatgagattagcttgctaatcttgatggcgaccggcgcacgggtgagtaacgcgtatccaaccttccctatactagaggatagcccggcgaaagtcggattaatactctatgttcttcgtagatgacatctgaaatgaagcaaagatttatcggtataggatggggatgcgtctgattagatagtaggcggggtaacggcccacctagtcgacgatcagtaggggttctgagaggaaggtcccccacattggaactgagacacggtccaaactcctacgggaggcagcagtgaggaatattggtcaatgggggaaaccctgacgcagcaacgccgcgtgcgggatgaaggccttcgggttgtaaaccgctttcagtagggaagaaagtgacggtacctacagaagaagctccggctaactacgtg

SEQ ID NO: 9797 - DNA, 490 bp, unidentified
  misc_feature 1..490: note = Ascusbbf_665583, encodes 16S rRNA
  source 1..490: mol_type = genomic DNA
agagtttgatcctggctcaggacgaacgctggcggcatgcctaacacatgcaagtcgaacggagattatttcggtaatcttagtggcggacgggtgagtaacgcgtgggtaacctgcctcacacagggggataacagttagaaatgactgctaataccgcataacccgataggatcgcatgatccagacggaaaagatttatcggtgtgagatggacccgcgtctgattagcttgctggcggggtaacggcccaccagggcgacgatcagtaggggttctgagaggaaggtcccccacattggaactgagacacggtccaaactcctacgggaggcagcagtgaggaatattggtcaatggacgagagtctgaaccagccaagtagcgtgcaggaagacggccctatgggttgtaaactgcttttataggggaataaagtgagccacgtgtggttttttgcatgtaccctatgaataaggaccggctaat

SEQ ID NO: 9798 - DNA, 490 bp, unidentified
  misc_feature 1..490: note = Ascusbbf_1787803, encodes 16S rRNA
  source 1..490: mol_type = genomic DNA
agagtttgatcctggctcaggatgaacgctagcggcaggcctaatacatgcaagctgaacggtaaatattgtagcaatacgatatgagagtagcgtaagggtgcgtaacacgtatgcaatctgccctgtacaggaggatagctcggggaaactcggattaatactccgtaagatattggtggggcatctcacagatattaaagtcttcggatggtacaggatgagcatgcgtctgattagctagttggtggtgtaacggaccaccaaggcgatgatcagtaggggaactgagaggttgatcccccacactggcactgagatacgggccagactcctacgggaggcagcagtagggaatattggtcaatgggtgagagcctgaaccagccatgccgcgtgcaggaagacggccttctgggttgtaaactgcttttactgggggataaaattctcttgcgagggaaattgaaggtacccggtgaataagcca

SEQ ID NO: 9799 - DNA, 484 bp, unidentified
  misc_feature 1..484: note = Ascusbbf_1426239, encodes 16S rRNA
  source 1..484: mol_type = genomic DNA
agagtttgatcatggctcagaacgaacgctggcggcacgcttaacacatgcaagtcgaacgatgtaatggggcttgctccattacatagtggcggacgggtgagtaacacgtggagacctgactagaggaggtggatagctccgggaaactggaggtaatacagcataagctcgagagaggaaaggggaaacccacctttagagggatctgcggctgattaggtagttggtggggtaaaggcctaccaagccgacgatcagtagctggtctgagaggatgatcagccacactggaactgagatacggtccagactcctacgggaggcagcagtggggaatattggacaatggggggaaccctgatccagcgatgccgcgtgagtgaagaaggccttagggttgtaaagctctgtcctcaaggaagataatgacggtacttgaggaggaagccccggctaattacgtgccagcagccgcggtaat

SEQ ID NO: 9800 - DNA, 490 bp, unidentified
  misc_feature 1..490: note = Ascusbbf_1783810, encodes 16S rRNA
  source 1..490: mol_type = genomic DNA
agagtttgatcctggctcaggatgaacgctggcggcgtgcctaatacatgcaagtcgaacggagattaagtagcttgctatttaatcttagtggcgcacgggtgagtaatgtatagttaatctgccctacactggaggacaacagttagaaatgactgctaatactccatactccttcttaacacaagttaagtcgggaaagtttttcggtgtaggatgagactatattgtatcagctagttggtgaggtaatggctcaccaaggctatgacgcataactggtctgagaggatgatcagtcacactggaactgagacacggtccagactcctacgggaggcagcagtagggaatgttgctcaatgggggaaaccctgaagcagcaacgccgcgtggaggatgacacttttcggagcgtaaactccttttgtcagggaagaaccatgacggtacctgacgaataagcaccggctaactccgtgccagcagc

SEQ ID NO: 9801 - DNA, 450 bp, unidentified
  misc_feature 1..450: note = Ascusbbf_1133734, encodes 16S rRNA
  source 1..450: mol_type = genomic DNA
agagtttgatcctggctcaggatgaacgctagctacaggcttaacacatgcaagtcgaggggcagcatatcgaaagcttgcttttgatgatggcgaccggcgcacgggtgagtaacgcgtatccaaccttccctatactagaggatagcccggcgaaagtcggattaatactctatgttcttcgtagaagacatctgaaatgaagcaaaggtttaccggtataggatggggatgcgtctgattaggttgttggcggggtaacggcccaccaagcccacgatcagtaggggttctgagaggaaggtcccccacattggaactgagacacggtccaaactcctacgggaggcagcagtgaggaatattggtcaatggacgagagtctgaaccagccttgtaggtactgtatgaataaggaccggctaattccgtgccagcagccgcggtaat

SEQ ID NO: 9802 - DNA, 490 bp, unidentified
  misc_feature 1..490: note = Ascusbbf_1378773, encodes 16S rRNA
  source 1..490: mol_type = genomic DNA
agagtttgatcctggctcaggatgaacgctagcggcaggcttaacacatgcaagtcgaggggtaacgcggggtagcactactctggcgacgaccggcgcacgagtgcgtaacgcgtatgcaacctacctgtaacaggggtataacggagagaaatttccactaatcccccatattgttagagattcgcatgtttctctaacgaaagcttcggtggttacggatgggcatgcgtgacattagctagttggtaaggtaacggcttaccaaggcgacgatgtctaggggagctgagaggcttatccccaacacaggtactgggacacggaccagactcatacgggaggcagcaggggggaatatgggtaaatggacggaagtcgaaacaagccaggccgggtggaggaagaaggtcctatgggtggtaaacgccttttgttcgagagtaagaagaggctggcgagcctcgatgagagtatcggacgaataagc

SEQ ID NO: 9803 - DNA, 490 bp, unidentified
  misc_feature 1..490: note = Ascusbbf_1378761, encodes 16S rRNA
  source 1..490: mol_type = genomic DNA
agagtttgatcatggctcaggatgaacgctagctacaggcttaacacatgcaagtcgaggggtaacgacagcgaaagcttgcttttgctgggcgacgaccggcgaatgggtgagtaacgcgtatccaacctgccgcaaagtagggcacagtcttgcgaaagtaagattaatgccctatgtgctgtgatcaggacatctgaattgcagtaaaggttcaccgctttgcgatggggatgcgtctgattaggttgttggcggggtaacggcccaccaagcccgcgatacgtaggggttctgagaggacaagctgcccaattggaactgagagccggtccaaaatcctgcgggaggcaggagtgaggaatattggacaaggggcggacgtcggaaaaagccatgccgcgtggaggaagaaggtcctatgggttgtaaactccttttgttcgagagtaataagggctttgcgaagcccgatgagagtatcggacga

SEQ ID NO: 9804 - DNA, 203 bp, unidentified
  misc_feature 1..203: note = Ascusbbf_1413454, encodes 16S rRNA
  source 1..203: mol_type = genomic DNA
agagtttgatcctggctcagatttcacggcggataacgtggtagtaatgaatggtgctaaaatgacgctgtacgctctgggacaagcactgtttgatgaaggcgacgaggttttgattcctttgccatactgggtaacctatggcgaacaggttaagctggccggtgccaagccagtcttcgtcaagccagcagccgcggtat

SEQ ID NO: 9805 - DNA, 490 bp, unidentified
  misc_feature 1..490: note = Ascusbbf_776828, encodes 16S rRNA
  source 1..490: mol_type = genomic DNA
agagtttgatcctggctcaggacgaacgctggcggcgtgcttaacacatgcaagtcgagcgaggacggcaccttcgggtgtcgagccgagcggcggacgggtgaggaacacgtaagcgatctatcctcgtgcgggggacaacccggggaaacccggactgataccgcatgggccgacagcccgcatgggcggtcggggaaaggcggcctctgcttatgcaagctgtcgcgcggggaggagcttgcggcctatcagctagttggtgaggtaacggctcaccaaggcggtgacgggtagcgggtctgagaggacggcccgccacattgggactgagacacggcccagactcctacgggaggcagcagtgaggaatattggtcaatgggcggaagcctgaaccagccatgccgcgtgcaggaatgaggccctacgggtcgtgaactgcttttcgcgcggagcaataaggggggttcgcccctccgatgagagt

SEQ ID NO: 9806 - DNA, 490 bp, unidentified
  misc_feature 1..490: note = Ascusbbf_1122313, encodes 16S rRNA
  source 1..490: mol_type = genomic DNA
aaagtttgatcatggctcagaacgaacgcttgcggcatgcttaaaacatgcaagtcgaacgagaaagggacttcggtcctgagtacagtggcgcacgggtgagtaacacgtaactaacgtcccttatcgctggggataactccgggaaaccggagctaataccgaatgatctaagagagtctctgggctttcttggtaaagcttccgggcgcgatgagatcgggttgcggcccattagcttgttggtggggtaatggcctaccaaggctacgatgggtagctggtctgagaggatgatcagccacactggaactgaaacacggtccagactcccacgggaggcagcagttgggaatattggacaatgggggaaaccctgatccagcaatgccgcgtgaatgatgaaggccctcgggtcgtaaagttcttttagcagggaagaagggaaacttgaccgtacctgcagaaaaagcaccggctaactccgtgc

SEQ ID NO: 9807 - DNA, 490 bp, unidentified
  misc_feature 1..490: note = Ascusbbf_1070647, encodes 16S rRNA
  source 1..490: mol_type = genomic DNA
agagtttgatcctggctcaggatgaacgctagcgataggcttaacacatgcaagtcgaggggcagcaaggggtagcaatactctgttggcgaccggcggatgggtgagtaacacgtatgcaacctgccctctactcagggatagcccgttgaaagacggattaatacttgatattattaattatccgcatggattattaatgaaagatttattggtagaggatgggcatgcgtttcattagcttgttggtgaggtaacggctcaccaaggcaacgatgaataggggaactgagaggtttatcccccacactggaactgagacacggaccagactcctacgggaggcagcagtgaggaatattggtcaatggacgcaagtctgaaccagccaagtcgcgtgatggatgactgccttatgggttgtaaacatcttttatatgggaataaagtgctctacgtgtagggttttgcaagtaccatatgaataagc

SEQ ID NO: 9808 - DNA, 490 bp, unidentified
  misc_feature 1..490: note = Ascusbbf_1010027, encodes 16S rRNA
  source 1..490: mol_type = genomic DNA
agagtttgatcctggctcagagtgaacgctggcggcaggcctaacacatgcaagtcgaacggcagcgcggggagcttgctccttggcggcgagtggcggacgggtgaggaatacatcggaatctgcctatttgtgggggataacctcgggaaaccgggactaataccgcatacgacctacgggtgaaagcggaggaccttcgggcttcgcgcagatagatgagccgatgtcggattagatagttggtgaggtaatggctcaccaagtcgacgatccgtagctggtctgaggggatgaccagccagactggaactgagacacggtccagactcctacgggaggcagcagtgaggaatcttccacaatgggcgaaagcctgacggagcaacgccgcgtgagtgatgacggccttcgggttgtaaagctctgtgatcggggacgaacggtccgtaagctaataccttatggaagtgacggtacccgaatagca

SEQ ID NO: 9809 - DNA, 490 bp, unidentified
  misc_feature 1..490: note = Ascusbbf_1767632, encodes 16S rRNA
  source 1..490: mol_type = genomic DNA
agagtttgatcctggctcaggacgaacgctggcggcgtgcttaacacatgcaagtcgaacggaaaggcctcttcgggggtactcgagtggcgaacgggtgagtaacacgtgggtaacctgcccctggctttgtgataactccgggaaaccggggctaataccggatggtgactgtctgccgcatggtgggtggttgaaagtttttcggctggggatgggcccgcggcctatcagcttgttggtggggtgatggcctaccaaggcggtgacgggtagccggcccgagagggtgaccggccacactgggactgagacacggcccagactcctacgggaggcagcagtggggaatattgcgcaatgggcggaagcctgacgcagcgacgccgcgtgagggatgacggccttcgggttgtaaacctctttcagctctgacgaagctttcgggtgacggtaggagcagaagaagcaccggccaactacgtgccag

SEQ ID NO: 9810 - DNA, 470 bp, unidentified
  misc_feature 1..470: note = Ascusbbf_1640995, encodes 16S rRNA
  source 1..470: mol_type = genomic DNA
agagtttgatcctggctcagaacgaacgctggcggcaggcctaacacatgcaagtcgaacgccctagcaatagggagtggcgcacgggtgagtaacgcgtgggaatgtacccttgggtgcggaacaacatcgggaaactgatgctaataccgcataatatctacggatcaaagatttatcgcccaaggatcagcccgcgtaagattaggtagttggtggggtaacggctcaccaagccgacgatctttagctggtcttagaggatgatcagccacactgagactgagacacggcccagactcctacggggggcagcagtgaggaatcttggacaatgggggaaaccctgatccagccatgccgcgtgagtgatgaaggccttcgggttgtaaagctctttcagatgtgaagataatgacggtagcatcagaagaagctccggctaactccgtgccagcagccgcggtaat

SEQ ID NO: 9811 - DNA, 490 bp, unidentified
  misc_feature 1..490: note = Ascusbbf_1532648, encodes 16S rRNA
  source 1..490: mol_type = genomic DNA
agagtttgatcctggctcaggatgaacgctggcggcaggcttaatacatgcaagttgaacggtaacagatttggtagcaatactagatgctgacgagtggcgtacgggtgcgtaacacgtgtgtaacctaccttatacaggaacaaaacatcgagaaattggtgctaatattccataatattatgtataggcatctatatataattaaagctacggtggtataagatgggcacgcggtccattagctagttggtatggtaacggcataccaaggcgacgatggataggggttctgagaggaaagtcccccacattggaactgagacacggtccaaactcctacgggaggcagcagtgaggaatattggtcaatggccgagaggctgaaccagccaagtagcgtgcaggacgactgccttacaggttgtaaactgcttttatgcaagagtaaagtgagctacgtgtagtttattgcaagtattgcatgaat

SEQ ID NO: 9812 - DNA, 490 bp, unidentified
  misc_feature 1..490: note = Ascusbbf_1092362, encodes 16S rRNA
  source 1..490: mol_type = genomic DNA
agagtttgatcatggctcaggatgaacgctagcgggaggcctaacacatgcaagccgagcggtatagttctttcgggaactagagagcggcgtacgggtgcggaacacgtgtgcaacctgcccttatcaaggggatagcccggagaaattcggattaataccctataatatatggtgaggcatctcactatattaaaaactgaggtggataaggatgggcacgcgcaagattagctagttggtgaggtaacggctcaccaaggcgacgatctttagggggcctgagagggtgatcccccacactgggactgagacacggcccagactcctacggggggcagcagtgaggaatattggacaatgggtggaagcctgatccagccatcccgcgtgaaggatgaaggttctatggattgtaaacttcttttgtatagggataaacctactctcgtgagggtagctgaaggtactatacgaataagcaccggct

SEQ ID NO: 9813 - DNA, 490 bp, unidentified
  misc_feature 1..490: note = Ascusbbf_1471084, encodes 16S rRNA
  source 1..490: mol_type = genomic DNA
agagtttgatcctggctcagattgaacgctggcggcatgcttaacacatgcaagtcgaacggcagcatgacctagcttgctaggttgatggcgagtggcgaacgggtgagtaacgcgtaggaatatgccttaaagagggggacaacttggggaaactcaagctaataccgcataatttcttaggaaaaaagctggggatcgtaagacctggcgctttaagattagcctgcgtccgattagctagttggtagggtaaaggcctaccaaggcgacgatcggtagctggtctgagaggatgaccagccacactggaactgagacacggtccagactcctacgggaggcagcagtggggaatattggacaatgggggcaaccctgatccagcaatgccgcgtgtgtgaagaaggcctgagggttgtgaagcactttcagtggggaggaggattttctggttaagagctggagaattggacgttacctacagagg

SEQ ID NO: 9814 - DNA, 490 bp, unidentified
  misc_feature 1..490: note = Ascusbbf_1420068, encodes 16S rRNA
  source 1..490: mol_type = genomic DNA
agagtttgatcctggctcagagcgaacgctggcggcgtgcctaacacatgcaggtcgaacgtgaacggcttcggcctagtaaagtggcgtacgggtgagtaacacgtggataatctaccctagagtctggaataacctgccgaaaggcgggctaatactggatagagcgacgaaatctgtaattgggtttttcgggaaagggagctcgctagagccctcgctttaggatgagtctgcgtcccattaggtagttggtggggtaatggcctaccaagcctgtgatgggtagctggtctgagaggatgatcagtcacactggaactgagacacggtccagacacctacgggaggcagcagtggggaatattggacaatgggcgaaagcctgatccagccatgccgcgtgtgtgaagaaggtcttcggattgtaaagcactttaagttgggaggaagggttgtagattaatactctgcaattttgacgttacca

SEQ ID NO: 9815 - DNA, 490 bp, unidentified
  misc_feature 1..490: note = Ascusbbf_1151552, encodes 16S rRNA
  source 1..490: mol_type = genomic DNA
agagtttgatcatggctcaggataaacgctggcggcgtgcctaatgcatgcaagtcgcacgggagccctttcgggggtcgaccgtggcggacgggtgaggaacacgtggctaacctgcccaacagtgggggataacctcgggaaaccgaggctaataccgcatacgcttagtttcgggaacggagctaaggaaaggagtaatccgctgatggagggggctgcggccgattagctagttggtggggtaagagcctaccaaggcggtgatcggtagctggtctgagaggacgatcagccacacggggactgagacacggccccgactcctacgggaggcagcagcaaggaattttccacaatgggcgcaagcctgatggagcaacgccgcgtgggggatgacgcttttcggagtgtaaaccccttttcgagaggacgaagccaatgacggtactctcggaataaggaccggctaactacgtgccagcagccg

SEQ ID NO: 9816 - DNA, 490 bp, unidentified
  misc_feature 1..490: note = Ascusbbf_972528, encodes 16S rRNA
  source 1..490: mol_type = genomic DNA
agagtttgatcctggctcaggacgaacgctggcggtgtgcttaacacatgcaagtggagcgacgaaccagggcttgccctggggcaaagccgcgaacgggtgagtaacacgtgggtaacctgccccgatgactgggacaacccgaggaaactcgggctaataccggatgtcctcatcactcacgagagtgatgagcaaagatagcttcggctttcgcattgggaggggcccgcggcccattagcttgttggtggggtaacggcctaccaaggcaacgatgggtagctggtctgagaggacgatcagccacactgggactgagacacggcccagactcctacgggaggcagcagtggggaatcttgcgcaatgcgcgaaagcgtgacgcagcaacaccgcgtgagggaagacggccttcgggttgtaaactgcttttgtatggggataaagtgctccacgtgtggagttttgtaggtaccatacgaataag

SEQ ID NO: 9817 - DNA, 466 bp, unidentified
  misc_feature 1..466: note = Ascusbbf_1418748, encodes 16S rRNA
  source 1..466: mol_type = genomic DNA
agagtttgatcctggctcaggatgaacgctggcggcgtgcctaacacatgcaagtcgaacggtcaaaccgccctcgggcggagatagagtggcgaacgggtgagtaacacgtgaccaacctgccccgcgcaccgggacaaccccccgaaagggggattaataccggatactccggcggcgcgggatggggtcgcggcccatcaggtagacggccgggtagaggccggccgtgccgacgacgggtaaccgggttgagagaccgaccggccacattgggactgagatacggcccagactcctacgggaggcagcagtggggaatattgcgcaatgggggcaaccctgacgcagcaacgccgcgtgcgggacgaaggcactcgtgtcgtaaaccgctttcagcagggaagacatcgacggtacctgcagaagaagccccggctaactacgtgccagcagccgcggtaat

SEQ ID NO: 9818 - DNA, 490 bp, unidentified
  misc_feature 1..490: note = Ascusbbf_1487849, encodes 16S rRNA
  source 1..490: mol_type = genomic DNA
agagtttgatcctggctcaggatgaacgttggcggcatgcctaacacatgcaagtcgaacgcgaggcttcggtctcgagtggcgaacgggtgcgtaacacgtaggtgacctgcccagcagtgggggataaccagcggaaacgctggctaataccgcatacgtgtacgagggtttgagactcgtacagaaagctcaatgtgctgctggaggggcctgcggcctatcaggtagttggtggggtaacggctcaccaagccgatgacgggtagctgacctgagagggtggtcagccacaggggaactgagagacggtccccactcctacgggaggcagcagtgagggatattggtcaatggccgagaggctgaaccagcaatgccgcgtgcgggaggacgcccttcggggtgtaaaccgcttttctgggggacgagacaaggacggtaccccaggaacaagttacggctaactacgtgccagcagccgcggtaa

SEQ ID NO: 9819 - DNA, 490 bp, unidentified
  misc_feature 1..490: note = Ascusbbf_1619739, encodes 16S rRNA
  source 1..490: mol_type = genomic DNA
agagtttgatcctggctcaggatagacgctggcggcgcacataagacatgcaagtcgaacggacttaattcgttagtttactaatggaagcggttagtggcggactggtgagtaacgcgtaagcaacctgcctattagtagggaataacagtgagaaatcattgctaataccgtataagctggaaacatcgcatgatgtagtcagaaaaggagcaattcgctaatagatgagcctaagtcggattagctagttggtggggtaaaggcctaccaaggcgacgatctgtagcgggtctgagaggatgatccgccacactgggactgagacacggcccagactcctacgggaggcagcagtgaggaatattggacaatgggggaaactctgacgcagtgacgccgcgtgcaggaagaaggttttcggattgtaaactgctttagacagggacgaaacaaatgacggtacctgtagaataagctccggctaact

SEQ ID NO: 9820 - DNA, 490 bp, unidentified
  misc_feature 1..490: note = Ascusbbf_1766751, encodes 16S rRNA
  source 1..490: mol_type = genomic DNA
agagtttgatcatggctcaggatgaacgctagcgggaggcttaatacatgcaagtcgtacggtaacatgtccttcgggatgatgacgagtggcggacgggtgagtaacgcgtacacgatctacctataagtctgggatagtcactggaaacggtgaataatatcggatgtggatatattgcttcatggtgatatatttaaaggctagactgcttatagatgagtgtgcgtcctattagttagttggagaggtaacggctccccaaggcgatgataggtagggggcgtgagagcgtggacccccacacgggtactgagacacggacccgactcctacgggaggcagcagtaaggaatattggacaatgggcgagagcctgatccagccatcccgcgtgcaggaagacagccctatgggttgtaaactgcttttataagggaagaacgtccccgattgatcggggtatgacggtaccttaggaataagcacc

SEQ ID NO: 9821 - DNA, 472 bp, unidentified
  misc_feature 1..472: note = Ascusbbf_1896136, encodes 16S rRNA
  source 1..472: mol_type = genomic DNA
agagtttgatcatggctcagagcgaacgctggcggcaggcttaacacatgcaaatcgaacggccgtagcaatacggcagtggcagacgggtgagtaacacgtgggaatgtacccttcggttcggaataacccagggaaacttgggctaataccggatacgcccttacggggaaagatttattgccgaaggatcagcccgcgtccgattagctagttggtggggtaatggcccaccaaggcgacgatcggtagctggtctgagaggatgatcagccacactgggactgagacacggcccagactcctacgggaggcagcagtggggaatattggacaatgggcgcaagcctgatccagccatgccgcgtgggtgatgaaggccctagggttgtaaagccctttcggcggggaagataatgacggtacccgcagaagaagccccggctaacttcgtgccagcagccgcggtaat

SEQ ID NO: 9822 - DNA, 490 bp, unidentified
  misc_feature 1..490: note = Ascusbbf_1799989, encodes 16S rRNA
  source 1..490: mol_type = genomic DNA
agagtttgatcctggctcaggatcaacgctggcggcgtgcctagtgcatgcaagtcgaacgggcttcccttcgggggagtcacgtggcggacgggtgaggaacacgtgggcgacctaccctggggcgggggatagccgcgagaaatcgtggataattccgcatacgctccctcccgtgttgtgggggggaggaaaggtgcgtttcggcgcgccacccttggcggggcctgcggccgattagttagttgggggggtaacggcctcccaaggcgatgatcggtagctggtctgagaggacggccagccaaacggggactgagacacggccccgactcctacgggaggcagcagcaaggaatcttccgcaatgggcgaaagcctgacggagcaacgccgcgtgcgggatgacgcccttcggggtgtaaaccgcttttacggggggataaagtgagtgatgtgtcattcattgcaggtaccccgcgaataagga

SEQ ID NO: 9823 - DNA, 490 bp, unidentified
  misc_feature 1..490: note = Ascusbbf_795219, encodes 16S rRNA
  source 1..490: mol_type = genomic DNA
agagtttgatcctggctcaggatgaacgctagctacaggcttaacacatgcaagtcgaggggcagcatgcaggaagcttgcttcttgtgatggcgaccggcgcacgggtgcgtaacgcgtatccaatctaccctatactcggggacagccctgcgaaagtaggattaatacccgatgttcttatgatgccgcatgacattataagcaaagatttattggtataggatgaggatgcgtcccattaggcagtaggcggggtaacggcccacctaaccgacgatgggtaggggttctgagaggaaggtcccccacattggaactgagacacggtccaaactcctacgggaggcagcagtgaggaatattggtcaatgggcgagagcctgaaccagccaagtagcgtgcaggaagacggccctatgggttgtaaactgcttttataggggaataaagtgagccacgtgtggttttttgcatgtaccctatgaat

SEQ ID NO: 9824 - DNA, 485 bp, unidentified
  misc_feature 1..485: note = Ascusbbf_1198901, encodes 16S rRNA
  source 1..485: mol_type = genomic DNA
agagtttgatcctggctcagaacgaacgctggcggcatgcctaacacatgcaagtcgaacgggatcttcggatctagtggcggacgggtgagtaacgcgtgggaacctgcccttgggtacggaataacagttggaaacgactgctaataccgtatacgtccccctttggttgacattgggggagaaagatttatcgcccttggaggggcccgcgtgagattaggtagttggtggggtaatggcctaccaagccgacgatctctagctggtttgagaagatgatcagccacactgggactgagacacggcccagactcctacgggaggcagcagtggggaatattggacaatgggggcaaccctgatccagcaatgccgcgtgagtgaagaaggccttagggttgtaaagctcttttacccgggaagataatgacggtaccgggagaataagccccggctaactccgtgccagcagccgcggtaat

SEQ ID NO: 9825 - DNA, 490 bp, unidentified
  misc_feature 1..490: note = Ascusbbf_1200639, encodes 16S rRNA
  source 1..490: mol_type = genomic DNA
agagtttgatcatggctcaggacgaacgctggcggcgcgcctaacacatgcaagtcgaacggagaaaggaaagcttgcttttctttcttagtggcggacgggtgagtaacacgtgagcaacctgccttacagagggggataacgttctgaaaagaacgctaataccgcataacacagttttggggcatcctggaattgtcaaaggagcaatccgctgtaagatgggctcgcgtccgattaggcagttggcggggtaacggcccaccaaaccgacgatcggtagccggactgagaggttgaacggccacattgggactgagacacggcccagactcctacgggaggcagcagtgggggatattgcacaatgggggaaaccctgatgcagcgacgccgcgtgagggaagaaggttttcggattgtaaacctctgtcttcggtgacgaaaatgacggtaaccgaggaggaagccacggctaactacgtgccag

SEQ ID NO: 9826 - DNA, 490 bp, unidentified
  misc_feature 1..490: note = Ascusbbf_775784, encodes 16S rRNA
  source 1..490: mol_type = genomic DNA
agagtttgatcatggctcaggatgaacgctgacagaatgcttaacacatgcaagtcgatggggaagtggtacttgtcactatgggaaccatggcggacgggtgagtaacgcgtaaaggacttaccttttagactgggataacagtcggaaacgactgataagactggatataattaaggattcgcatgaatttttaatgaaaagaggagctaaaagagagctttgcgtcctattagctagttggtgaggtagaggctcaccaaggcgatgataggtagccggcctgagagggtgaacggccacaaggggactgagatacggcccttactcttacgggaggcagcagtggggaatattggacaatggagggaactctgatccagcaattctgtgtgcacgaagacggttttcggattgtaaagtgctttcagtagggaagaagtaagtgacggtacctacagaagaagcgacggctaaatacgtgccagca

SEQ ID NO: 9827 - DNA, 470 bp, unidentified
  misc_feature 1..470: note = Ascusbbf_1118643, encodes 16S rRNA
  source 1..470: mol_type = genomic DNA
agagtttgatcctggctcagaacgaacgctggcggcaggcttaacacatgcaagtcgagcgctgtagcaatacagagcggcagacgggtgagtaacgcgtggggatgtacccagaggtacggaacaacttcgggaaactggagctaataccgtatgtgaccgtgaggtgaaagatttatcgcctttggatcaacccgcgtcagattagctagttggtagggtaatggcctaccaaggcgacgatctgtagctggtctgagaggatgatcagccacattgggactgagacacggcccaaactcctacgggaggcagcagtggggaatattggacaatgggcgcaagcctgatccagccatgccgcgtgagtgatgacggccttagggttgtaaagctctttcgctcgcgacgataatgacggtagcgagagaagaagccccggctaacttcgtgccagcagccgcggtaat

SEQ ID NO: 9828 - DNA, 490 bp, unidentified
  misc_feature 1..490: note = Ascusbbf_765065, encodes 16S rRNA
  source 1..490: mol_type = genomic DNA
agagtttgatcatggctcaggatcaacgctggcggcgtgcctaatgcatgcaagtcgaacggagccgccttcgggcggtcacgtggcggacgggtgaggaacacgtgggcgatctgccccgaggcgggggatagctaccagaaatggtaggtaataccgcatgagcttcccgggttacggccggggaaggaaagtcgcgagacgccttgggaggagcctgcggcggattagctggttggtggggtaacggcctaccaaggcgatgatccgtagctggtctgagaggatggccagccacaggggaactgagacacggtccccactcctacgggaggcagcagcaaggaattttccgcaatgggtgaaagcctgacggagcaacgccgcgtgggggatgacgcttttcggagtgtaaaccccttttctcagggatgaaaccaatgacagtacctgaggaataaggaccggctaactacgtgccagcagccgc

SEQ ID NO: 9829 - DNA, 490 bp, unidentified
  misc_feature 1..490: note = Ascusbbf_1851741, encodes 16S rRNA
  source 1..490: mol_type = genomic DNA
agagtttgatcctggctcaggatgaacgctgacagaatgcttaacacatgcaagtcaatgagaagacttctcttcggagaagaggttatcatggcggacgggtgagtaacgcgtaaagaacttaccttatggtctgggataacagttggaaacgactgataacactggatactatgacagtttcgcatgaaactgttatgaaaagcaatgtcataagagagctttgcgtcctattagctagttggtgaggtaaaggctcaccaaggcgatgataggtagccggcctgagagggtgaccggccacaaggggactgagatacggcccttactcttacgggaggcagcagtggggaatattggacaatggaggcaactctgatccagcaattctgtgtgcacgaagaaggttttaggattgtaaagtgctttcagttgggaagaagcaagtgacggtaccaacagaagaagcgacggctaaatacgtgccagc

SEQ ID NO: 9830 - DNA, 490 bp, unidentified
  misc_feature 1..490: note = Ascusbbf_888701, encodes 16S rRNA
  source 1..490: mol_type = genomic DNA
agagtttgatcctggctcaggacgaacgctggcggcgtgcctaacacatgcaagtcgaacggtaaggcccttcggggtacacgagtggcgaacgggtgagtaacacgtgagcaacctgcccttgacttcggaataagcactcgaaagggtgcctaataccggatatgaccctcaccgacatcggagagggttgaaagccctggcggtcaaggatgggctcgcggcctatcagctagttggtgaggtaacggctcaccaaggcgtcgacgggtagccggcctgagagggcgaccggccacactgggactgagatacggcccagactcctacgggaggcagcagtggggaatattgcacaatgggcgaaagcctgatgcagcaacgccgcgtgcgggatgacggccttcgggttgtaaaccgctttcagtagggacgaagcgaaagtgacggtacctacagaagaagcaccggccaactacgtgccagcagc

SEQ ID NO: 9831 - DNA, 472 bp, unidentified
  misc_feature 1..472: note = Ascusbbf_1851187, encodes 16S rRNA
  source 1..472: mol_type = genomic DNA
agagtttgatcatggctcagaacgaacgctggcggcaggcttaacacatgcaagtcgaacgggtgtagcaatacatcagtggcagacgggtgagtaacacgtgggaaccttcctcgttgtacggaacaactcagggaaacttgagctaataccgtatacgtccgagaggagaaagatttatcgcaatgagacgggcccgcgtcggattagctagttggtagggtaacggcctaccaaggcaacgatccgtagctgatctgagaggaggatcagccacactgggactgagacacggcccagactcctacgggaggcagcagtggggaatcttggacaatgggcgcaagcctgatccagccatgccgcgtgagtgaagaaggccttagggttgtaaagctcttttgccagggacgataatgacggtacctggagaataagccccggcaaacttcgtgccagcagccgcggtaat

SEQ ID NO: 9832 - DNA, 490 bp, unidentified
  misc_feature 1..490: note = Ascusbbf_1209286, encodes 16S rRNA
  source 1..490: mol_type = genomic DNA
agagtttgatcctggctcaggatgaacgctagcgacaggcttaacacatgcaagtcgaggggcagcatggcggtggcaacaccgccgatggcgaccggcgcactggtgagtaacacgtatgcaacctgccccctgccggggaataaaccagggaaacttggcctaatgccgcataacacatcgtccggcatcggacggtgttgaaagctccggcggcaggggatgggcatgcgccgcattagcttgtaggcggggtgacggcccacctaggcgacgatgcgtaggggttctgagaggaaggtcccccacactggtactgagacacggaccagactcctacgggaggcagcagtgaggaatattggtcaatgggcgagagcctgaaccagccaagtagcgtgcgggacgaaggccctatgggttgtaaaccgcttttacggggggataaagtgagtgacgtgtcattcattgcaggtaccccgcgaataag

SEQ ID NO: 9833 - DNA, 490 bp, unidentified
  misc_feature 1..490: note = Ascusbbf_1013522, encodes 16S rRNA
  source 1..490: mol_type = genomic DNA
agagtttgatcctggctcaggacgaacgctggcggcatgcctaacacatgcaagtcgaacggaataggattggttgtagcgatacttttgatcctatttagtggcgaacgggtgagtaacacgtgagcaacctgccttttacacagggataacagccggaaacggctgctaataccggataagaccacaccgaggcatctcggaggggtcaaagcgcttagcggtaaaagatgggctcgcgtcccattagctagttggtgaggtaacggcccaccaagaccgcgatcggtagccggactgagaggttgaacggccacattgggactgagacacggcccagactcctacgggaggcagcagtggggaatattgcacaatgggggaaaccctgatgcagcgacgccgcgtgagtgaagaagtatttcggtatgtaaagctctatcagcaaggaagataatgacggtacttgactaagaagccccggctaact

SEQ ID NO: 9834 - DNA, 490 bp, unidentified
  misc_feature 1..490: note = Ascusbbf_1855665, encodes 16S rRNA
  source 1..490: mol_type = genomic DNA
agagtttgatcctggctcagcctgaacgctggcggcgtggctaagacatgcaagtcgtacggacgtagcaatacgtcagtggcggacgggtgagtaatgtatcgctaatgtacccttcactctgggatagccgtgggaaactgcgggtaataccagatgacataaccgaatcgcatggtttggttctcaaaggagcaatacggtgagggagcaggcgatatcgtatcagcttgttggtgaggtaatggctcaccaaggcgacgacgcgtagctggtctgagaggacggccagccacattgggactgagacactgcccagactcctacggggggctgcagtaacgaatcttccgcaatgcacgcaagtgtgacggagcgacgccgcgtggaggttaagtccttcgggatgtaaactcctgtcaggggttaccaagatctgaggagccccagaggaaggcacggctaactctgtgccagcagccgcggtaat

SEQ ID NO: 9835 - DNA, 490 bp, unidentified
  misc_feature 1..490: note = Ascusbbf_896278, encodes 16S rRNA
  source 1..490: mol_type = genomic DNA
agagttgatcatggctcaggatgaacgctagctacaggcttaacacatgcaagtcgaggggcagcatgaaatcagcttgctgactttgatggcgaccggcgcacgggtgcgtaacacgtatccaatctacccatggctcagggatagcctttcgaaagaaagattaatacctgatggtctgtgattgagacatctcgaacacagtaaagattaatcggcgatggatgaggatgcgtctgattagatagtaggcggggtaacggcccaccaagtcagcgatgggtagctggtgtgagagcacgaccagccacacgggcactgagacacgggcccgactcctacgggaggcagcagtgaggaatattggtcaatggacgcaagtctgaaccagccatgccgcgtggaggatgacagccttctgggttgtaaacttcttttatatgggaagaacagcatggtttctactatgtccgacggtaccatatgaata

SEQ ID NO: 9836 - DNA, 490 bp, unidentified
  misc_feature 1..490: note = Ascusbbf_872060, encodes 16S rRNA
  source 1..490: mol_type = genomic DNA
agagtttgatcctggctcaggacgaacgctggcggcgtgcttaacacatgcaagtcgaacgaggtccacggtgtcgcaagacacctgaagacctagtggcgaacgggtgcgtaacacgtgagaaacttgtcccggtctctggaataacagttggaaacaactgctaataccggatgccgtcggaccatcgcatggtggactgacgaaagggttaccggatcgggagagtctcgcggcctatcagcttgttggtgaggtaatggctcaccaaggcatcgacgggtagctggtctgagaggatgatcagccacactgggactgagacacggcccagactcctacgggaggcagcagtggggaatcttgcacaatgggcgaaagcctgatgcagcaacgccgcgtgcgggaagaaggccctagggttgtaaagctctttcaccggtgaagataatgacggtaaccggagaagaagccccggctaacttcgtgc

SEQ ID NO: 9837 - DNA, 490 bp, unidentified
  misc_feature 1..490: note = Ascusbbf_964974, encodes 16S rRNA
  source 1..490: mol_type = genomic DNA
agagtttgatcctggctcagattgaacgctggcggtatgcttaacacatgcaagtcgaacggcagcatgatgtgtagcaatacacattgacggcgagtggcggacgggtgagaaacgcgtaggaatctgccttatagagggggacaactagaggaaactctagctaataccgcataatgtctacggaccaaacgctggggcaacctggcgccataagaggagcctgcgtccgattagctagttggtggggtaaaggcctaccaaggcgatgatcggtagctggtctgagaggatgatcagccacactgggactgagacacggtccaaactcctacgggaggcagcagtgaggaatattggtcaatgggcgagagcctgaaccagccaagtagcgtgcaggaagacggccctatgggttgtaaactgattttgtatggggataaagtgctccacgtgtggagttttgtaggtaccatacgaataaggaccg

SEQ ID NO: 9838 - DNA, 490 bp, unidentified
  misc_feature 1..490: note = Ascusbbf_964588, encodes 16S rRNA
  source 1..490: mol_type = genomic DNA
agagtttgatcctggctcaggatgaacgctagctacaggcttaacacatgcaagtcgagcgatcccttcggggatagcggcggacgggtgagtaacgcgtgggaacgtgcccttttcttcggaatagcccagggaaacttggattaataccggatacgcccttcgggggaaagatttatcggaaaaggatcggcccgcgttggattaggtagttggtggggtaatggcctaccaagccgacgatccatagctggtttgagaggatgatcagccacactgggactgagacacggcccagactcctacgggaggcagcagtgaggaatattggtcaatgggcgtgggcctgaaccagccaagtagcgtgcaggatgacggccctatgggttgtaaactgcttttgtatggggatagagtgctccacgtgtggggcattgcaggtaccatacgaataaggaccggctaattccgtgccagcagccgcggtaat

SEQ ID NO: 9839 - DNA, 490 bp, unidentified
  misc_feature 1..490: note = Ascusbbf_1725703, encodes 16S rRNA
  source 1..490: mol_type = genomic DNA
agagtttgatcctggctcagaatgaacgttggcggcgtgcttaacacatgcaagtcgagcgagaaagttccttcgggaatgagtacagcggcggacgggtgtggaacgcgtgagaatctgccctttagtgaagaatacccttgagaaattgaggataatactgcatattcccttcgggggaaagatggctttatgctgtagctagaggatgagcttgcgtgctattagctagttggtgaggtaatggctcaccaaggcgatgatggctagccggcctgagagggtgtgcggccacattgggactgagatacggcccagactcctacgggaggcagcagtgaggaatattggtcaatgggcgagagcctgaaccagccaagtagcgtgcaggatgactgccctatgggttgtaaactgcttttatgcggggataaagtgacgtacgcgtacgtttttgcaggtaccgcatgaataaggaccggctaattcc

SEQ ID NO: 9840 - DNA, 490 bp, unidentified
  misc_feature 1..490: note = Ascusbbf_1222765, encodes 16S rRNA
  source 1..490: mol_type = genomic DNA
agagtttgatcctggctcagattgaacgctggcggcaggcttaacacatgcaagtcgtacggtaacagagggaagcttgcttctctgctgacgagtggcggacgggtgagtaacacgtgagaaacctgccccaaagactgggatgagccttggaaacgaggtctaataccggataccttctcttcatctcctgatgataagaagaaatgctccggcgctttgggatggtctcgcgacctatcagcttgttggtgaggtaaaagctcaccaaggctacgacgggtagctggtctgagaggatgtccagccacactggaactgagatacggtccagactcctacgggaggcagcagtagggaatcttgcacaatgagggaaaccttgatgcagcgacgccgcgtgcgggacgaaggccctagggttgtaaaccgctttcagttgggacgaaagtgacggtaccaacagaagaagccccggccaactatgtgc

SEQ ID NO: 9841 - DNA, 490 bp, unidentified
  misc_feature 1..490: note = Ascusbbf_1244773, encodes 16S rRNA
  source 1..490: mol_type = genomic DNA
agagtttgatcatggctcaggacgaacgctggcggcatgcctaacacatgcaagtcgaacggagaactccttcgggggttcttagtggcgaacgggtgagtaacgcgtaggcaacctgccctttggatggggacaacattccgaaaggagtgctaataccgaatgtgacgattttaccgcatggtttaatcgtgaaagatggcctctacatgtaagctatcgccaaaggatgggcctgcgtctgattagctagttggtggggtaacggctcaccaaggcgacgatcagtagccggtctgagaggatgatcagccacactgggactgagacacggcccagactcctacgggaggcagcagtggggaatattggacaatgggcgaaagcctgatccagcaatgccgcgtgtgtgaagaaggtcttcggattgtaaagcactttcgacggggacgatgatgacggtacccgtagaagaagccccggctaactt

SEQ ID NO: 9842 - DNA, 490 bp, unidentified
  misc_feature 1..490: note = Ascusbbf_769582, encodes 16S rRNA
  source 1..490: mol_type = genomic DNA
agagtttgatcatggctcagaacgaacgctggcggcaggcctaacacatgcaagtcgagcgaacccttcgaggttagcggcggacgggtgagtaacgcgtgggaatatgcccttctctacggaatagtctcgggaaactgggggtaataccgtatacgccctttgggggaaagatttatcggagaaggattagcccgcgttggattaggtagttggtggggtaatggcctaccaagcctacgatccatagctggtttgagaggatgatcagccacactggaactgagacacggtccagactcctacgggaggcagcagtgaggaatattggtcaatgggcgagagcctgaaccagccaagtagcgtgcaggatgacggccctatgggttgtaaactgcttttatatgaggataaagttcgttacgtgtaacgttttgcaggtatcatatgaataaggaccggctaattccgtgccagcagccgcggtaat

SEQ ID NO: 9843 - DNA, 490 bp, unidentified
  misc_feature 1..490: note = Ascusbbf_847445, encodes 16S rRNA
  source 1..490: mol_type = genomic DNA
agagtttgatcctggctcagattgaacgctggcggcaggcttaacacatgcaagtcgggcggtaacaggggagcttgctcccgctgacgagcggcggacgggtgagtaatgcatgggaatctgcccggtaatgggggatagcccggggaaacccggattaataccgcatacgccctacgggggaaagcaggggatcttcggaccttgcgttatcggatgagcccatgtcggattagctagttggtagggtaaaggcctaccaaggcgacgatccgtagctggtttgagaggatgatcagccacactgggactgagatacggcccagactcctacgggaggcagcagtcgggaatattgcgcaatggaggaaactctgacgcagtgacgccgcgtgcaggaagaaggttttcggattgtaaactgctttagacagggaagaacaaagacagtacctgtagaataagctccggctaactacgtgccagcagc

SEQ ID NO: 9844 - DNA, 153 bp, unidentified
  misc_feature 1..153: note = Ascusbbf_1604897, encodes 16S rRNA
  source 1..153: mol_type = genomic DNA
agagtttgatcatggctcagaaggagtgcaatccggaactgttttttcagtttgcgcagaaagtccagtaagtgatcaatggcgtgaggctgtttatcaaaataataatgaaccgactactttagctctaggaatgccagcagccgcggtaat

SEQ ID NO: 9845 - DNA, 490 bp, unidentified
  misc_feature 1..490: note = Ascusbbf_1709310, encodes 16S rRNA
  source 1..490: mol_type = genomic DNA
agagttgatcctggctcaggataaacgctggcggcgcacataagacatgcaagtcgaacggacttaattcgttagtttactaatggaagcggttagtggcggttgggtgagtaacgcgtatccaacctggccctatctcggggacagcccctcgaaagagggattaatacccgatgttccctggtttccgcatgtttaccagggcaaaggcatattgtcggatagggatggggatgcgttccattaggcagtcggcggggtaacggcccaccgagcctacgatggataggggttctgagaggaaggccccccacactgggactgagacacggcccagactcctacgggaggcagcagtgaggaatattggtcaatggcggcaacgctgaaccagccaagtagcgtgagggattactgccctatgggttttaaacctcttttgttggggagcaaccggcatcacttgtggtgccctgcgagtacccttcga

SEQ ID NO: 9846 - DNA, 490 bp, unidentified
  misc_feature 1..490: note = Ascusbbf_918578, encodes 16S rRNA
  source 1..490: mol_type = genomic DNA
agagtttgatcatggctcaggatgaacgctagctacaggcttaacacatgcaagtcgaggggcagcgggaggaaagcttgctttccttgccggcgaccggcgcacgggtgcgtaacgcgtatcgaacctggcccatacacggggatagtctcctgaaagggaggttaatacccggcggtcccacttggtcgcatgactgtgtgggtgaagattcatcggtatgggatggcggtgcgtaggattagctagtcggcggggtaacggcccaccgagccatcgatcagtaggggttctgagaggaaggtcccccacattggtactgagacacggaccaaactcctacgggaggcagcagtgaggaatattggtcaatgggcgcgagcctgaaccagccaagtagcgtgagggaagactgccttatgggttgtaaacctcttttgttagggagcaaccggtggcactagtgccattctgcgagtacctttcgaat

SEQ ID NO: 9847 - DNA, 490 bp, unidentified
  misc_feature 1..490: note = Ascusbbf_816599, encodes 16S rRNA
  source 1..490: mol_type = genomic DNA
agagtttgatcctggctcaggacgaacgctggcggcgtgcttcatacatgcaagtcgaacgagaaatttacttcggtaaatggaaagtggcggacgggtgagtaaaatgtagagaatctgccctagagagggggacaacagagggaaacttctgctaataccccatatgagcgtagctgagatgctattcttgaaaactccggtgctctgggatgagtctgcatctgattagctagttggtggggtaacggcctaccaaggcgacgatcagtagccggtctgagaggatgaacggccacattgggactgagacacggcccagactcctacgggaggcagcagtggggaatcttccgcaatgggcgaaagcctgacggagcaacgccgcgtgagtgaagaaggctttcgggttgtaaagctctgttatagaggacgaaggaagtgacggtactctataaggaagccccggctaactacgtgccagcagccg

SEQ ID NO: 9848 - DNA, 490 bp, unidentified
  misc_feature 1..490: note = Ascusbbf_846476, encodes 16S rRNA
  source 1..490: mol_type = genomic DNA
agagtttgatcatgctcaggatgaacgctagctacaggcttaacacatgcaagtcgaggggcatcacgggtcttgcttgcaagacctggtggcgaccggcgcacgggtgagtaacgcgtatccaacctgcccccgggacgggcacagcccggtgaaaaccggattaatgcccgatagggtcacaatagggcatctgagtgtgaccaaaggccttttggcgcccgcggatggggatgcgtctgattaggtagtaggcggggcaacggcccacctagccgtcgatcagtaggggttctgagaggaaggtcccccacattggtactgagacacggaccaaactcctacgggaggcagcagtgaggaatattggtcaatgggcgcaagcctgaaccagccaagtagcgtgcaggatgactgccctatgggttgtaaactgcttttatacggggataaagtcagagtcgtgactctgtttgcaggtaccgtatga

SEQ ID NO: 9849 - DNA, 474 bp, unidentified
  misc_feature 1..474: note = Ascusbbf_1487790, encodes 16S rRNA
  source 1..474: mol_type = genomic DNA
agagtttgatcctggctcaggatgaacgctggcggcgtgcttaatacatgcaagtcgagcggtaacacttcgggtgacgagcggcggacggctgagtaacacgtaggaacgtaccccaaactgagggataactgctcgaaagagtagctaataccacatgtgatcttcggattaaagcttcggcggtttgggaacggcctgcgcatgattagcttgttggtgaggtaacggctcaccaaggcaacgatcattagctggtctgagaggatgaccagccagactgggactgagacacggcccagactcctacgggaggcagcagtagggaattttccacaatggacgaaagtctgatggagcaacgccgcgtgcaggatgaaggctctagggtcgtaaactgcttttataggtgaagattatgacggtaacctatgaataaggatcggctaactccgtgccagcagccgcggtaat

SEQ ID NO: 9850 - DNA, 490 bp, unidentified
  misc_feature 1..490: note = Ascusbbf_1488771, encodes 16S rRNA
  source 1..490: mol_type = genomic DNA
agagtttgatcatggctcaggacgaacgctggcggtgtgcctcatacatgcaagtcgaacgagaatcgagagcttgctctcgaggaaagtggcggacgggtgagtacaacataggaaatctgccctaaagcgggggacaacagagggaaactcctgctaataccccatatgagcttggttgaaataccaatcttgaaagatttatcactttaggatgagcctgtgcctgattagctagttggtggtgtaatggactaccaaggcgacgatcagtagctggtttgagaggatgatcagccacaatgggactgagacacggcccatactcctacgggaggcagcagtagggaattttgcgcaatgggggaaaccctgacgcagcaacaccgcgtgaatgttaagcccttcggggtgtaaagttctgtcagtagggaagaacaaatgactgtacctacaaaggaagcaccggctaactccgtgccagcagccg

SEQ ID NO: 9851 - DNA, 490 bp, unidentified
  misc_feature 1..490: note = Ascusbbf_1896162, encodes 16S rRNA
  source 1..490: mol_type = genomic DNA
agagtttgatcctggctcaggatgaacgctagctacaggcttaacacatgcaagtcgaggggcagcatgacgatagcttgctattgtcgatggcgaccggcgcacgggtgagtaacgcgtatccaaccttcccgttgctaggggataaccttgcgaaagtaagactaataccctatgaggttcttcgcaggcatctaaagagaacgaaagatttatcggcaacggatggggatgcgtctgattagctagttggtgaggtaacggctcaccaaggcgacgatcagtagccgacctgagagggtgaacggccacattgggactgagacacggcccaaactcctacgggaggcagcagtgaggaatattggtcaatgggcgagagcctgaaccagccaagtagcgtgcgggacgaaggccctatgggttgtaaaccgcttttacggggggataaagtcgggaacgtgttcccgtttgtaggtactagatgaat

SEQ ID NO: 9852 - DNA, 175 bp, unidentified
  misc_feature 1..175: note = Ascusbbf_1582666, encodes 16S rRNA
  source 1..175: mol_type = genomic DNA
agagtttgatcctggctcaggatgaacgctggcggcgtgcttaacacatgcaagtcgcaaaaagtgaaacattatccatcacctttgtatttacaccatagtttcctgccgtcatgcggtaatatgtgtttgaactgcttgttatctttgcagtctggccagcagccgcggtaat

SEQ ID NO: 9853 - DNA, 484 bp, unidentified
  misc_feature 1..484: note = Ascusbbf_1583665, encodes 16S rRNA
  source 1..484: mol_type = genomic DNA
agagtttgatcctggctcagaacgaacgctggcggcaggcttaacacatgcaagtcgagcgcgcccttcgaggtgagcggcggacgggtgagtaacgcgtgggaacgtgcccctttcttcggaatagcctcgggaaactgggagtaatgccggatacgcccttttggagtgatccatttggggaaagatttatcggagagggatcggcccgcgttggattaggtagttggtggggtaatggcctaccaagccgacgatccatagctggtttgagaggatgatcagccacactgggactgagacacggcccagactcctacgggaggcagcagtggggaatcttggacaatgggggcaaccctgatccagccatgccgcgtgatcgatgaaggccttagggttgtaaagatctttcagctgggaagataatgacggtaccagcagaagaagccccggctaactccgtgccagcagccgcggtaat

SEQ ID NO: 9854 - DNA, 490 bp, unidentified
  misc_feature 1..490: note = Ascusbbf_1346565, encodes 16S rRNA
  source 1..490: mol_type = genomic DNA
agagtttgatcatggctcaggacgaacgctggcggcgggcttaacacatgcaagtcgaacggtaaggccgcttcgggggtacacgagtggcgaacgggtgaggaacacgggaggaacctgcccgggactctgggataagcagtcgaaagggtggcgaagactggataggacctgtgactgcatggtggtgggtggaaaggattttgcggggctgggaggggctcgcggccgatcagcttgttggtggggtgagggccgaccaaggcgtcgacgggtagccggcctgagagggcgaccggccccactgggcctgcggtacggccccgactcctacgggaggcagcagtggcgaatcttgcgctctgcgcggacgcctgccgcagcaacgccgcgtgcgggctgacggccttcgggttgtccaccgctttccgcagggacgacgattttttgacggtacctgcagaagaagcaccggcccactacgtgccag

SEQ ID NO: 9855 - DNA, 490 bp, unidentified
  misc_feature 1..490: note = Ascusbbf_1378644, encodes 16S rRNA
  source 1..490: mol_type = genomic DNA
agagtttgatcatggctcaggacgaacgctggcggcgtgcttaacacatgcaagtcgaacggtaaggcctcttcgggggtacacgagtggcgaacgggggaggaacacgtgagtaacctgccctggactctgggataagcagtcgaaagggtggcgaagactggataggacctgtgactgcatggtggtgggtggaaaggatttttctggtctgggaggggctcgcggccgatcagcttgttggtggggtgatggccgaccaaggcggcgacgggtagccggcctgagggggcgaccggccacactgggactgcggtccggccccgactcctccgcgaggcagcagtggggactattgcgccatgggcggaagcctgccgcagcaacgccgcgtgcgggatgacggccttcgggttgtccaccgctttcagcagggacgacgattttttgacggtacctgcagaagaagcaccggccaactacgtgccag

SEQ ID NO: 9856 - DNA, 486 bp, unidentified
  misc_feature 1..486: note = Ascusbbf_1346561, encodes 16S rRNA
  source 1..486: mol_type = genomic DNA
agagtttgatcctggctcagaacgaacgctggcggcaggtcttaggcatgcaagtcgaacggacgacagagtggcttgccattctgaagttagtggcgcacgagtgagtaacgcgtgggaaactgcccttcactggggaataacgtctggaaacggacgctaataccgcatacgcccgcaagggaaacgatttatcggtgatggatgtgcccgcgttggattagcgtgttggtggggtaatggcctaccaaggcgatgatccatagctggtctgagaggacgatcagccacgctggaactgagacacggaccagagacctacgtggggcagcagctaagagtatggggcaatggaggaaagtctaggacagagatgccgcgtgaatgaagaaggccttctggtagtaaagttctggtagtcatgaggatgttgacagtagtgaaagaaaaagcaccggctaactccgtgccagcagccgcggtaat

SEQ ID NO: 9857 - DNA, 490 bp, unidentified
  misc_feature 1..490: note = Ascusbbf_1444368, encodes 16S rRNA
  source 1..490: mol_type = genomic DNA
agagtttgatcctggctcaggatgaacgctagcggcaggcttaacacatgcaagtcgaggggtaacgcgaggtagcaatactctggcgacgaccggcgcacgggtgcgtaacgcgtatgcaacctacctgtaacaggtgtataacggagagaaatttccactaatccaccatattgttattctttcgcatgttaggataacgaaagcttcggtggttacggatgggcatgcgtgacagtagctagttggtaagggaacggcttacaaaggcgacgatgtctaggggagcggtgaggctgtagccccataccgggcatggcaaagcggaccagactcctccgggaggcagaagtgatgaatgttgttaaatggacgaaagtctgaaccagccatgccgcgtggaggaagaaggtcctatgggttgtaaactccttttgttcgagagtaataagaggcttgcgagcctcgatgagagtatcggacgaataag

SEQ ID NO: 9858 - DNA, 490 bp, unidentified
  misc_feature 1..490: note = Ascusbbf_1346564, encodes 16S rRNA
  source 1..490: mol_type = genomic DNA
agagtttgatcatggctcaggacgaacgctggcggcgtgcttaacacatgcaagtcgaacggtaaggcctcttcgggggtacacgagtggcgaacgggggagtaacacgtgagtaacctgccctggactctgggataagcagtcgaaagggtgtcgaagactggataggacctgtgactgcatggtggtgggtggaaaggatttctctggtctgggaggggctcgcggcctatcagcttgttggtggggtgatggccgaccaaggcgtcgacgggtagccggccggagagggcgaccggccccacttggactggggtccggccccgcctcctacgggcggcagcagtggggaatattgcgccatgtgcggacgcctgccgccgcaccgccgcgtgcgggatgacggccttcgggttgtacaccgctttcagcagggacgacgattttttgacggtacctgcagaagaagcaccggcccactccgtgccag

SEQ ID NO: 9859 - DNA, 490 bp, unidentified
  misc_feature 1..490: note = Ascusbbf_1378643, encodes 16S rRNA
  source 1..490: mol_type = genomic DNA
agagtttgatcatggctcaggatgaacgctagcggcaggcttcacacatgcaagtcgaggggtaacgcggggtagcaatactctggcgacgcccggcgcacgggtgcgtaacgcgtatgcaacctacctgtaacaggggtataacggagagaaatttccactaatcccccatattgttagagattcgcatgtttctctaacgaaagcttcggtggttacggatgagcatgcgtgacattagctagttggtaaggtaacggcttaccaaggcgacgatgtctaggggagctgagaggcttatacccaaagtgggtaatgagacacggaccagaatcctacggggggcagcagtgaggaagattggtcaatggacggaagactgaacaagccatgccgcgtggaggaagaaggacctatgggttgtaaactccttgtgttcgagagtaataagaggcttgcgagcctcgaggagagtatcggacgaataagc

SEQ ID NO: 9860 - DNA, 490 bp, unidentified
  misc_feature 1..490: note = Ascusbbf_1346478, encodes 16S rRNA
  source 1..490: mol_type = genomic DNA
agagtttgatcctggctcaggatgaacgctagcgacaggcttaacacatgcaagtcgtggggcagcatgatcgaagctggctttgattgatggcgaccggcgcacgggtgagtaacgcgtatccaaccttccctatactagaggatagcccggcgaaagtcggattaatacgctatgttgtattgagatgatgtgtgaagaataggaaagattcatcggtataggatggggaggcgtctgattaggttggtggcggggtaacgccacaccaagcccacgatgagtaggggttatgagaggaaggtccaccagaatggaactgaacaccgaaccaaacacctcagggaggaagcagtgagaaatattggtcaatgaaacacagtcgcagccagccaagtagcgtgcagaatgccggcccgttgggttgtaaactgcttttatatagggataaagtcggagacgtgtccccgtttgtaggtactatatgaat

SEQ ID NO: 9861 - DNA, 490 bp, unidentified
  misc_feature 1..490: note = Ascusbbf_1378681, encodes 16S rRNA
  source 1..490: mol_type = genomic DNA
agagtttgatcctggctcaggatgaacgctagcggcaggcttaacacatgcaagtcgaggggcagcgcggggtagcaatcctctggcggcgaccggcgggggggtgcgtaacgcgtgagcaacttgcccgtcactggggggtaggcactgggaacggtgtgtaattctccctaacatatggattcacatggattcatattgaaagattcgttggtgacggatgggctcgcgtaacataagctagttggcggggtaacggcccaccgaggctacgatgtttaggggttctgagaggaaggtcccacacgatgggactgagggacgggccagattcctacggcaggaagcagtaaggaatattggtcaatgagcggaagcctgaaccagccatgccgcgtggaggaagaaggccctatgggttgtaaactccttttgttcgagagtaataagggctttgagaagcccgatgagagtagcggacgaataagca

SEQ ID NO: 9862 - DNA, 490 bp, unidentified
  misc_feature 1..490: note = Ascusbbf_1444658, encodes 16S rRNA
  source 1..490: mol_type = genomic DNA
agagtttgatcctggctcaggataaacgctggcggcgcacataagacatgcaagtcgaacgaacttaatcgaaagtttacttttgaagcggttagtggcggactggtgagtaacgcgtaagcaatctgcctatcagaggggaataacagtgagaaatcattgctaataccgcataagctgtgagtatcgcatactacaactagaaaaggagcactccgctgatagatgagcttgggtctgattagttaggtggtggggtaccggcctaccaagacgaggatcagtagccggactgagaggtaaaacggcaacattgggactgaggtacggcccagaaacctacggagagcagcaggcgggaatatggcgaaatggaggaaactctgaggcagagacgccgcgggcaggaagaaggtttgcggattgtaaactgctttagatagggaagaaaaaaaatgacggtacctatagaataagcaccggctaacta

SEQ ID NO: 9863 - DNA, 486 bp, unidentified
  misc_feature 1..486: note = Ascusbbf_1444326, encodes 16S rRNA
  source 1..486: mol_type = genomic DNA
agagtttgatcctggctcagaacgaacgctggcggcaggtcttaggcatgcaagtcgaacggacgccagagtggcttgccattctgaagttagtggcgcacgagtgagtaacgcgtgggaaactgcccttcactggggaataacgtctggaaacggacgctaattccgcatacgcccgccaggggaaagaattatcggtgatggatgtgcccgcgttggattagcttgttcgtggggtaatggcctagcaaggcgatgatccatagctggtctgagaggacgatcagccaccctggaactgaggaacggtccagactcctacggggggcagcagcgaagaatattgggcaatggcggaaactctgacccagccatgccgcgggaatgaagaaggccttcggggtgtaaagttcttgtagtcatgaagatgatgacagtagtgacagaaaaagcaccggctaacttcgtgccagcagccgcggtaat

SEQ ID NO: 9864 - DNA, 490 bp, unidentified
  misc_feature 1..490: note = Ascusbbf_1378669, encodes 16S rRNA
  source 1..490: mol_type = genomic DNA
agagtttgatcctggctcaggatgaacgctggcggcgtgcctaatacatgcaagtcgaacgaggtttctcttcggggaaaccgagtggcgaacgggtgagtaacacatagttaatctacctttcagaatgggatacccaagagaaattttggctaataccgtatacaatcatttctccgcttggagatttgatgaaaggggctccaaagcctcgctgttagcttaacctgtggcacattggctagttggtgatataacagcccaccaaggcgaagaggtgtagccgatctgaaaggaaaatcaggcaaattggatcttggacccggcccatactcccacggtaggcagcagtagggagctttcggcaatgggggaaaccctgaccgagcacagccgcgtgatttagaaggccctctgggtcgtaagaatctgttgtaaaggagaaatggtagtgggaggaaatgcccattatttgatagtactttattag

SEQ ID NO: 9865 - DNA, 490 bp, unidentified
  misc_feature 1..490: note = Ascusbbf_1346524, encodes 16S rRNA
  source 1..490: mol_type = genomic DNA
agagtttgatcctggctcaggatgaacgctagcggcaggcttaacacatgcaagtcgaggggtaacgcggggtagcaatactctggcgacgaccggcgcacgggtgcgtaacgcgtatgcaacctacctgtaacaggggtataacggagagaaatttccactaatcccccatattgttagagattcgcatgtttctctaacgaaagcttcggtggttacggatggacatgcgggactttggcaagttggtaaggtaacgacttaccaaggcgacgatgtctaggggagctgggaggcttatcccccacacaggtagtgagacacggaccaaactcctgcgggaggcgtcagtgaggaagattagtcaatggacggaagtctgaaccagccatgccgtgtggaggaagaaggtcctatgggttgtaaactccttttgttcgagagtaataagaggcttgcgagcctcgatgagagtatcggacgaataagc

SEQ ID NO: 9866 - DNA, 490 bp, unidentified
  misc_feature 1..490: note = Ascusbbf_1378945, encodes 16S rRNA
  source 1..490: mol_type = genomic DNA
agagtttgatcctggctcagaacgaacgctggcggcaggcttaacacatgcaagttggacgggaatcgattgatagcttgctattgcttgaggagagtagcgcacgggtgagtaacacgtgggaacataccgtatagtgggggataacaattggaaacgattgataataccgcataagtcctaagggagaaaggagtaattcgctataagattggcccgcggaagattaggcagtgggtggggtaaaggcctaccaaacctacgatctatagctggtctgcgaggacgatcagccacattgggcctgtgcctcggccccaactcctacgggcggccgccgtggggactcttgggcactgggggcacccctgccccggccctgccgcgtgagtgaagccggttttcgacttgtaaagctctttcggatgtgaagctgatgacggtagcctctcaagacgccccggcaaccttcgtgccagcagccgcggta

SEQ ID NO: 9867 - DNA, 490 bp, unidentified
  misc_feature 1..490: note = Ascusbbf_1346843, encodes 16S rRNA
  source 1..490: mol_type = genomic DNA
agagtttgatcatggctcaggataaacgctggcggcgtacataagacatgcaagtcgaacggccgcaatcaatagtttactattgttgcggttagtggcggactggtgagtaacacgtatgtaacctgcctatcagaggggaacaacagctagaaatgactgcgaagaccgcatatgccataactagcgcatgacagaagtgggaaaggagcaatccgctgagagatggacttgcgtctgattagatagttggtggggtaacggcccaccaagtcgacgatcagtagccggactgagagggtaaccggccacgttgggcctgcgtgacggcccggactcctacgggcggcagccgtcgggactattgcgcactggcggaaactctgacgcagtgccgccgcgtgcagggagaaggttttcggattgtaaactgctttagacagggaagaaacacgacagtacctgtagaataagctccggctaactacgt

SEQ ID NO: 9868 - DNA, 490 bp, unidentified
  misc_feature 1..490: note = Ascusbbf_1444314, encodes 16S rRNA
  source 1..490: mol_type = genomic DNA
agagtttgatcatggctcaggatgaacgctagcgacaggcctaacacatgcaagtcgaggggcagcgcgggagaagcttgcttttcctggcggcgaccggcgcacgtgtgcgtaacaggtgtgcaatctttccatcgtcggggaatagcccagcgaaagttggattactgctccatgtttcacgaagccgcatgactttgtgatgaaacgtaattcctctggttgagcacgcttctgcgtagatagttggtgagttaacgtctcaccaagtctactatcagtcggggttctgcgagaaaggccccacaactaggaactgggaaacggtccaaacgcctacgggaggcagccgtgaggaagattggtcaatgggcgagagcctgaaccagccaagtagcgtgaaggatgaaggttctatggattgtaaacttcttttgtccgagggtaaaaaaggccacgtgtggctgcttgcaagtatcggacgaataag

SEQ ID NO: 9869 - DNA, 486 bp, unidentified
  misc_feature 1..486: note = Ascusbbf_1378986, encodes 16S rRNA
  source 1..486: mol_type = genomic DNA
agagtttgatcctggctcagaacgaacgctggcggcaggtcttagacatgcaagtcgaacggccgccagactggcttgcccttctgatgttagtggcccacgagtgcgtaacgcgcgggtaactgcccttcactggggtataacgtctggaaacggacgccactaccgcatacgcccgcttcgggtacggtgtctcggttgtggatctgccggcgttgggttagcttgttggtggggtaattgccttcctaggcggtgatccctggctggtctgagacgacgagcaggcactatggaactgggacacggtccagactccgacgggaggcagcagctaagaatattgggcaacggaggagactccgacccagccatgccgcgtgaaggaagaaggccttcgggtgggaaagtgcgtggagtcaggaagatgatgacagtagtgaaagaaaaagcaccggctaactgcgtgccagcagccgcggtaat

SEQ ID NO: 9870 - DNA, 490 bp, unidentified
  misc_feature 1..490: note = Ascusbbf_1444318, encodes 16S rRNA
  source 1..490: mol_type = genomic DNA
agagtttgatcatggctcaggataaacgctggcggcgtacataagacatgcaagtcgaacggtcccattctatcgcttacttttttttcgtttagtcgcggacccgtgagtaacacgtatgtaacctgcctatcagagtggaacaccagctagaaattacttccatgaccgcatatgccataactatcgcatgacagaagtgggaaaggagcaatccgctgatagatggacttgcgtctgattagatagttggtggggtaacggcctaccaattcgacgatcagtagccggactgagagggtcatcagcgacattgggactgatatccggcccaggctcctacggggggcagcagtcgggactattgcgcaatggaggaaactctgacgcagtgccgccgcgtgcaggcagaaggttttcggattgtaaactgctttagacaggggagaaacacgacggtacctgtagaataagctccggctaactacgt

SEQ ID NO: 9871 - DNA, 486 bp, unidentified
  misc_feature 1..486: note = Ascusbbf_1444366, encodes 16S rRNA
  source 1..486: mol_type = genomic DNA
agagtttgatcctggctcagaacgaacgctggctgcaggccttaggcatgcaagtcgaacggccgccagagttgcttgcccttctgtagttagtggcgcacgagcgagtaactcgtgcgtaaccgcccttcactgtggtataacgtctggcaacggacgctaataccgcacacgaccgcatggggtacgatttagagtgtgtggttgtgcacaggtcggtttagcttgttggtggggcaatggcataccatggcgatgatacatagctgacctgagaggatgatcagccacgctggaactacgacacggtccagactcctacggtaggcagcagctaagaatattgggcaatggaggaaactctgacccagccatgccgcgtgaatgaagaaggccttcgggttgtaaagttcttttagtcatgaagatgatgacagtagcgacagaaaaagcaccggctaacttcgtgccagcagccgcggtaat

SEQ ID NO: 9872 - DNA, 282 bp, unidentified
  misc_feature 1..282: note = Ascusbbf_1346528, encodes 16S rRNA
  source 1..282: mol_type = genomic DNA
agagtttgatcatggctcaggatgaacgctagctacaggcttaacacatgcaagtcgcgcagcatcatggcatgtagcaatacatgctgatggcgaccggcggatgggtgtgtgacgcgtagccaacctggccctatctcgaacacagcacctcgaaagagggattacggccctatgttccctaaactcctcatgttagcgagcaaacggtggcacttgtgccattcagggagtacctttcgattaagcatcggccaacgccgcggcagcacgcgcggtaat

SEQ ID NO: 9873 - DNA, 486 bp, unidentified
  misc_feature 1..486: note = Ascusbbf_1318961, encodes 16S rRNA
  source 1..486: mol_type = genomic DNA
agagtttgatcatggctcagaacgaacgctggctgcaggtcttagacatgcaagtcgaacggacgacagagtgtcttgcccttctgatgttggtggcgcacgagtgagtgactcgcgggtaactgcccttcactggggaataacgtctggcgacggacgctaataccgcatacgccctcaaggggagatctttatcggtgatggatgtgcgcgcgttggactgggttgttggtggggtaatggccttcataggcgatgtaccatacctggtatgcgaggacgatcagccaccctggaactacgacacggtccagactcctacgggaggcagcagctaagaatatgaggcaatggaggaaactctgacccagccatgccgcgtgaatgaagaaggccttcgggttgtaaagttcttttagtcgtgaagatgatgacagtagtgacagaaaaagcaccggctaacttcgtgccagcagccgcggtaat

SEQ ID NO: 9874 - DNA, 490 bp, unidentified
  misc_feature 1..490: note = Ascusbbf_1378975, encodes 16S rRNA
  source 1..490: mol_type = genomic DNA
agagtttgatcatggctcaggatgaacgctagcggcaggcttaacacatgcaagtcgaggggtaacgcggggtagcaatactctggcggcgaccggcgcacgggtgcgtaacgcgtatgcaacctacctgtaacaggggtataacggagagaaatttccactaatcccccatattgttattctttcgcatgttaggataacgaaagcttcggtggttacggatgggcatgcgtgacattagctagttggtaaggtaacggcttaccaaggcgacgatgtctaggggagctgaggggcttatcgaccacagtggtactgagacacggagcgaactgagagagggggcagcagcgaggaatatgggtcagtggacagaagtctgaaccagccatgcggcgtggaggaagaaggcccgaggggttgtaaactccttttgttcgagagtaataagggcgtggcgaagccagatgagagtatcggacgaataagc

SEQ ID NO: 9875 - DNA, 490 bp, unidentified
  misc_feature 1..490: note = Ascusbbf_1346456, encodes 16S rRNA
  source 1..490: mol_type = genomic DNA
agagtttgatcctggctcaggacgaacgctggcggcgtgcttaacacatgcaagtcgaacggagtgcttctgtaggaggattcgtccaacggaaggagtaacttagtggcggactggtgagtaacgcgtgaggaacatgcctttcagagggggacaacagttggaaacgactgctaataccgcatgatgcatgaccggggcattccggacatgccaaagatttatggctgaaagatggcctcgcgtctgattagatagttggtggggtaacggcccaccaagtcgacggtcagtggcaggactgggaggggaacggggcacaatgggactgagagacgggccagactcctacgggagggagaagtggggaatattgggcgatagacgcaagtctgacccagcgacgcggcgtgaaggaagaaggctttcgggtggtaaacgtcttttaagggggaaggggtgaagacggtaccccttgaataagcaacgg

SEQ ID NO: 9876 - DNA, 490 bp, unidentified
  misc_feature 1..490: note = Ascusbbf_1378757, encodes 16S rRNA
  source 1..490: mol_type = genomic DNA
agagtttgatcatggctcaggatgaacgctagcgacaggcctaacacatgcaagtcgaggggcagcgcgggagaagcttgcttttcctggcggcgaccggcgcacgggtgcgtaacaggtgtgcaatctgtccatagtcggggaatagcccagcgaaagttggattaatgctccatgtgaatcgagaccgcatgatcttgatttgaaacgtaaggactatgggtgagcacgcttctgattagctcgttggcggggcaacggcccaccacgacgacgatcggtagccggcctgatgggttggaccgcaacagtgagaagaagagacggcacggactccgacgggaggcagaggtagggaatattgaacgatgggggaaaccctgatgcagcaacgccacgtgtgggaagaagcatttcggtgtgtaaaccactgtcgtgagggaataaggcattgtttcggcgatgttgaatgtacctcgagaggaagcac

SEQ ID NO: 9877 - DNA, 490 bp, unidentified
  misc_feature 1..490: note = Ascusbbf_1346598, encodes 16S rRNA
  source 1..490: mol_type = genomic DNA
agagtttgatcctggctcaggacgaacgctggcggcgtgcttaacacatgcaagtcgaacgatgatgaccggagcttgctttggttggattagcggcgaacgagtgagtaacacgtgagtaacctgcccccttcttcgggataaccactggaaacggtggctaatattgggtatgacatcagatcgcatggattggtgtggaaaggttttttctggtgggggatgggaacgcggtctatcagctggttggtggggggatggcctaccaaggtctgatgggtagccggcctgagcgggcgaccggccaagctgggactgggacacggcccagactcctacgggaggcagcagtcgggaatattgcacaatgggggaaaccctgatgcagcgacgccgcgtgggggatgaaggccttcgggttgtaaacccctttcagtaaggaacaaggccatgattgttgttgtggttgagggtacttgcagaagaagcg

SEQ ID NO: 9878 - DNA, 486 bp, unidentified
  misc_feature 1..486: note = Ascusbbf_1444536, encodes 16S rRNA
  source 1..486: mol_type = genomic DNA
agagtttgatcctggctcagaacgaacgctggcggcaggccttaggcatgcaagtcgaacggacgacagagtggcttgccattctgaagttagtggcgcacgcgtgagtaacgcgtgggaaactgcccttcactggggaataacgtctggcgacggacgctaataccgcatacacccgcaaggggaaagatttatcggtgatggatgtgcccgcgttggattagctggttggtggggtaatggcctaccaaggcgaggatccatagctggtctgagaggacgatcagccacgctggaactgagacacggtccagactcctacgagaggcggcagcaacgaatagtgggcaatggaggaaactctgacccggccatgccgcgtgaaggaagaaggccttcgggtcgtaaagttcttttagtcatgaagatgatgacagtagtgacagaaaaagcaccggctaactccgtgccagcagccgcggtaat

SEQ ID NO: 9879 - DNA, 490 bp, unidentified
  misc_feature 1..490: note = Ascusbbf_1346675, encodes 16S rRNA
  source 1..490: mol_type = genomic DNA
agagtttgatcctggctcaggataaacgctggcggcgcacataagacatgcaagtgaacggacttaactcattcttaacgattgagagcgtttagtggcggacttgtgagtaatttataagtaacctgcctatcagaggggaacaacagttggaaacgactgctaataccgcatatgccacgagaatcacatggttcaagtgggaaaggagcaatccgctgatagatggccttatatctgattagctagttggtggggtaacggcctaccaaggcgacgatcagtagccggactgagccgttaaacggcaacattgggactgagaaacggcccagactccaccgggaggcagcagtcggaaatatggagaaagggaggaaactctgaggaagtgacgccgcggggaggaagaaggttttcggactgtaaactgctttagacagggaagaaaaaagacagtacctgtagaataagctccggctaactacgt

SEQ ID NO: 9880 - DNA, 490 bp, unidentified
  misc_feature 1..490: note = Ascusbbf_1346590, encodes 16S rRNA
  source 1..490: mol_type = genomic DNA
agagtttgatcatggctcaggacgaacgctggcggcgtgcttaacacatgcaagtcgaacgctgaagctcccagcttgctgggggtggatgagtggcgaacgagtgagtaacacgtgagtaacctgcccctgactctgggataagcactagaaatggtgtctaatactggatatatctcatggccgcatggtcggtgagtggaaagatttatcggttggggatggactcgcggcctatcagctagatggtgaggtactggctcaccatgtcgacgactggtagccggcctaggagggtgaccggcaacactgggacggggacacggcccagactcctacgggaggcagcagtggggaatattgcacaatggacgcaagcctgatgcagcaacgccgcgggagggatgacggccttcgggttgtaaacctatgttagtagggaagaagcgaaagtgacggtacctgcagaaaaagcaccggctaactacgt

SEQ ID NO: 9881 - DNA, 490 bp, unidentified
  misc_feature 1..490: note = Ascusbbf_1378722, encodes 16S rRNA
  source 1..490: mol_type = genomic DNA
agagtttgatcctggctcaggacgaacgctggcggcatgcttcacacatgcaagtcgaacggactgcttccttcgggcttacagttcgtggcgaacgggtgagtaatgtatgagccacctgcctctatcaacggtctaacagttggaaacgcctgctattacggtctaagaccacggcaccgcatgattctgcggtaaaatatttttcggatatcgatgggctcatatccccttagctggttggtgggaaaaccgcccaccaaggcgacgatgggtagccgagctgacaggctgctcggcaacattgggacggaaacacggcccagactccgacgggaggcagcagtggggaatagtgggcaatggaggcaacgctgacccagcaatgccgcgtgagtgaggaaggtaattttagtgtaaagctcttttcgcaggaacgaataaagatgacggtacctgaggaataagccccggctaactacgtggcagc

SEQ ID NO: 9882 - DNA, 490 bp, unidentified
  misc_feature 1..490: note = Ascusbbf_1444554, encodes 16S rRNA
  source 1..490: mol_type = genomic DNA
agagtttgatcctggctcaggacgaacgctggcggcatgcttaacacatgcaagtcgaacggactgattccttcgggctgatagtttgtggcgaacgggtgagtaatgtatgagcaacctgcctctatcaacgggataacagttagaaacgactgctaatacggtataagaccacggcaccgcatgatgctgcggtaaaagatttttcggatagagatgggctcatatcccattagctagttggtgagataacagcccaccaaggcgacgatgggtagccgagctgagaggatgatcggccaaaaagggaactgaacaacggcccgagagctacgggaggcagcagtggggaatattgggcaatggaggcaactctgacccagcaatgccgcgtgagtgaggaaggtaattttatggtaaagcgctcttctcaggaaggaataaagatgacggtaccggaggaagaagccccggctaactacgtgccagc

SEQ ID NO: 9883 - DNA, 490 bp, unidentified
  misc_feature 1..490: note = Ascusbbf_1378726, encodes 16S rRNA
  source 1..490: mol_type = genomic DNA
agagtttgatcatggctcaggatgaacgctagcggcaggcttaacacatgcaagtcgaggggcagcgcggggtagcaatactctggcggcgaccggcggaagggggcgtaccgcgtgagcaacgtgcccgtcactgggggagaggcactggaaacggtgtgtaatactccataccatatgtcttcacatggattcatattgcaagattcgttggttacggatgggctcgcgtaacattcgccagtcggcggggtaacggcccacccaggcgacgatgtttaggggttctgcgaggaaggtcaccagcgctgacactggacaacggtccagattcctacgggaggcagcagtgaggaatattggtcaatgggcggaagcctgaaccagccatgccgcgtgaaggaataaggccctatgggtcggaaactgcttttccttgagggaaataagggtaacgtgtggcccgatgagagtatcaggggaataagca

SEQ ID NO: 9884 - DNA, 490 bp, unidentified
  misc_feature 1..490: note = Ascusbbf_1444562, encodes 16S rRNA
  source 1..490: mol_type = genomic DNA
agagttgatcatggctcaggatgaacgctgacggcgtggttaacacaggcaagtagaacggagggagcgcgcggaggagagcttgctcaaagcgggagagaacggagtggcggacgggtgaggaacgcgtggataacctgccggatacggggggagaacactgagaaataggttctaataccgcataagcgcacgttcccgcatgggaaagtgtgaaaaacgccggtggcgtaagatggatccgcgtctgattagatagttggtggggtaacggcccacaaagccaacgatcagtagccggcctgcgagggggcacggccacagtgggactgcgacacggccccgactcctacgggaggcagcagtggggcatcttgcacaatgggggaaaccaggatgcagcgacgccgcgtgagtgaagcagtatttcggtatgtaaagctctatcagcaaggaagaaaaaaatgacggtacttgactaagacgcccc

SEQ ID NO: 9885 - DNA, 490 bp, unidentified
  misc_feature 1..490: note = Ascusbbf_1444549, encodes 16S rRNA
  source 1..490: mol_type = genomic DNA
agagtttgatcctggctcaggacgaacgctggcggcgtgcttaacacatgcaagtcgaacgggagtatcaaagaagcttgcttttatgatactttagtggcggacgggtgagtaacgcgtgaggagctgtcctatgcagggggacaacagttggaaacggctgctaataccccataagccgagaggtaaaaggttttgtccggcaaaggaggcactcgcgtcctatcagctagtgggttgggtaacggccgacctaggcgaagacgggtagccggcctgagagggcgaacggccacactggaacggagagacggtgcagactccgacgggagggagaagtggggaatattgggcaatgggggcaaccctgagcgagcgacgcggcgtgggtgaagaaatccttcgggatgtaaagcgctgttgtaggggaagagtagaagacggtaccatacgaggaagccccggcaaactacgtgccagcagccgcggt

SEQ ID NO: 9886 - DNA, 490 bp, unidentified
  misc_feature 1..490: note = Ascusbbf_1346603, encodes 16S rRNA
  source 1..490: mol_type = genomic DNA
agagtttgatcctggctcaggatgaacgctagcggcgtgcctaacacattcaagtcgaacggagatatactgaagcttgcttttgtctattttagtggcggacgggtgagtaatgcatgagcaacctgccttaacgagtgggataacacagagaaatttgtgctaataccgcataagctgcgaaggagtcctctcccattcagaaaaggagcaatccgctttaagatggtctcatgtctgattctatagtttgtagggtaacggcctaccaagccggcgatcattagccggactgagaggtagaacggacaacacggaacagagctacggtccagactcgtacgggaggcagaagtggggaatattgggcaaggggcgaaagcctgacccagcaacgccgcgtgaaggaagaaggtcttcggattgtaaactgcgtggacaggggacgaagcatgacggtaccctgaaaacaagccacgactaactacgt

SEQ ID NO: 9887 - DNA, 486 bp, unidentified
  misc_feature 1..486: note = Ascusbbf_1444624, encodes 16S rRNA
  source 1..486: mol_type = genomic DNA
agagtttgatcctggctcagaacgaacgctggcggcagggctgaggcatgcaagtcgaacggacgacagagtggcgtgccattctgaagttaggggcgcacgggtgagtaacgcgtgggaaacggcccttcactggggaataacgtcgggaaacggacgctaagaccgcatacgcccgcaaggggaaagagttatcggtgatggatgtgcccgcgtgggagtagcgtgttggtgggggaatggcctacaaaggcgaggagccatagctggtctgagaggacgatcagccacgctggaacggcgacccggtcccgactcctacgggcggcagccgctcagactcttgggcactggcggaccctctgcccccgccctgccgcgtgaatgaagacggccttcgggttgtatagttcttttagtcatgaagctgatgcccgtagtgacagaacaagcaccggctaacttcgtgccagcagccgcggtaat

SEQ ID NO: 9888 - DNA, 486 bp, unidentified
  misc_feature 1..486: note = Ascusbbf_1444625, encodes 16S rRNA
  source 1..486: mol_type = genomic DNA
agagtttgatcatggctcagaacgaacgctggcggcagggctgaggcatgcaagtcgaacggacgacagagtggcgtgccattctgaaggtaggggcgcacgggtgagtaacgcgggggaaacggcccttcactggggaataacgtcgggaaacggacgcgaagaccgcagacgcccgcaaggggaaagaggtagcggtgacggatgggcccgcgtgggagtagcgtgtggggggggtaatggcctaccaaggcgatgtgccagagctggtctgagaggacgatcagccacgctggaactgcgccccggtcccgactcctccgggcggcggccgctccgcctcttggccactggcggaccctctgcccccgccctgccgcgtgaatgacgccggccttcgggttgtacagttcttttagtcctgacgctgatgacagtagtgacagaacacgcaccggctaccttcgtgccagcagccgcggtagt

SEQ ID NO: 9889 - DNA, 486 bp, unidentified
  misc_feature 1..486: note = Ascusbbf_1346461, encodes 16S rRNA
  source 1..486: mol_type = genomic DNA
agagtttgatcatggctcagaacgaacgctggcggcaggtcttaggcatgcaagtcgaacggacgacagagtggcttgccattctgaagttagtggcgcacgagtgagtaacgcgtgtgaaaccgcccttccctggggaataccgtctggctacggacgctactaccgcatacgcccgccaggggaaagatttatcgttgatggatgtgcccgcgttggattagcttgttggtggggtaatggcctaccaaggcgatgatccatagctggtctgagaggacgatcagccacgctggaactgagaaacgggccagactcctacgggaggcagcagctaagaatattggacaatggaggaaactctgacgcagccatgccgcgtgaatgaagaaggccttcgggttgtaaagttcttttagtaatgaagatgatgacagtagtgacagaaaaagcaccggctaacttcgtgccagcagccgcggtaat

SEQ ID NO: 9890 - DNA, 490 bp, unidentified
  misc_feature 1..490: note = Ascusbbf_1444672, encodes 16S rRNA
  source 1..490: mol_type = genomic DNA
agagtttgatcctggctcaggatgaacgctagctataggcttaacacatgcaagtcgcggggcatcatggcatgtagcaatacatgctgatggcgaccggcggatgggtgagtaacgcgtatccaaccttgccctatctcgggtacagcccctcgaaagagggattaatccccgatgttccctgtgatccgcatgttttccagggcaaaggcattagtcggatagggatgggagagcgttccgttatgcagtcggcggggtaacgccccaccgagactacgatggagaggggttctgagaggaaggccccccacactggtactgagacacggcccagactcctacgggaggcagcagtgaggaatattggtcaatggcggcaacgctgaaccagccaagtagcgtgaaggatgacggccctatgggttttaaacctcttttgttagggagcaacctatggcactagtgccatactgcgagtacctttcga

SEQ ID NO: 9891 - DNA, 490 bp, unidentified
  misc_feature 1..490: note = Ascusbbf_1324126, encodes 16S rRNA
  source 1..490: mol_type = genomic DNA
agagttttatcctggctcaggatgaacgctggcggcgtgcttaacacatgcaagtcgaacggagttatctcgctgaggagagcttgcgcaaatcgtgagataagttagtggcggacgggtgagtaacgcgtggataacctgcattataccgggggataacacttagaaataggtgctaatgccgcataagcgcacgagccggcatgggaaagtgtgaaaaactccggtggtataagatggatcggcgtctgataagaaagtcggtgaggtaacggcccaccaagacaacgatcagtagccggcctgagggggtgaacgaccaccgtggaactgagacacagcccaaactcctacggggggcagcagtggtgaatattgcacaatgcgggaaaccctgatgcagcgacgccgcgtgggtgaagaagtatttcggtatgtaaagctctatcagcaaggaagaaaaaaatgacggtacttgactaagaagccc

SEQ ID NO: 9892 - DNA, 486 bp, unidentified
  misc_feature 1..486: note = Ascusbbf_1444674, encodes 16S rRNA
  source 1..486: mol_type = genomic DNA
agagtttgatcatggctcagaacgaacgctggctgcaggtcttaggcatgcaagtcgaacggacgacagagtggcttgccattctgaagttagtggcgcacgagtgagtaacgcgtgggaaaccgcccttcactgtggaataacgtctggaaacggacgctaataccgcatacgcccgcaaggggagagatttatcgctgttggatgtgcccgcgttggattagcttgttggtggggtaatggcctaccaaggcgatgatccatagctggtctgagacgacgatcagccacgctggaactgcgacacggtccagactcgtacgggaggcagcagctaagaatattgggcaatcgaggaaagtgtgagctagccatgccgtgtgaatgaagaaggccttcgggttgtaaagttcttttagtcatgaagatgatgacagtagtgacagaaaaagcaccggctaacttcgtgccagcagccgcggtaat

SEQ ID NO: 9893 - DNA, 490 bp, unidentified
  misc_feature 1..490: note = Ascusbbf_1378771, encodes 16S rRNA
  source 1..490: mol_type = genomic DNA
agagtttgatcatggctcaggatgaacgctagctacaggcttaacacatgcaagtcgcggggcatcatggtgtgtagcaatacacactgatggcgaccggcgaatgggtgattaacgcgtatccaacctggccctatctcgggcacagcccctcgaaagagggattaattcccgatgttcccacgagttcgcatgttcttgtgggtaaaggcctttgccggatagtgattgggatgcgttccattacgcggtcggcggggtaacggcccaccgagccttcgatggataggggttctgagagcatgccacacaacacggggaaggacgaaaggcccagactcctacgggaggcagcagtgaggaatattggtcaatggcggcaacgctgaaccagccaagtagcgtgagggattacggccctatgggttttaaacctcttttgttggggagcaacctgtgccactagtggcacactgcgagtacccttcga

SEQ ID NO: 9894 - DNA, 490 bp, unidentified
  misc_feature 1..490: note = Ascusbbf_1444691, encodes 16S rRNA
  source 1..490: mol_type = genomic DNA
agagtttgatcctggctcaggatgaacgctagcggcaggcttaacacatgcaagtcgaggggaaacgcggggaagaaatactctggcgacgaccggcgaccgagtccgtaacgcgtatgcaccctacctgtaacaggggaatacgggagagaaatttccactaatcccccatattgttattctttcgcatgttaggttaacgaacgcttcggtggttacggatgggcatgcgtgacattagcgcgtgggtacggtaacggcttcccaaggctacgttgtctaggggggctgcgagtcttatccaccacactggtactgagacacggaccagactcctacgggaggcagcagtgaggaatattggtcaatggacggaagtctgaaccagccatgccgcgtggaggaagaaggtcctatgggttgtaaactccttttgttcgagagtaataagaggcttgcgagcctcgatgagagtatcggacgaataagc

SEQ ID NO: 9895 - DNA, 490 bp, unidentified
  misc_feature 1..490: note = Ascusbbf_1323951, encodes 16S rRNA
  source 1..490: mol_type = genomic DNA
agagtttgatcctggctcagattgaacgctggcggaatgctttacacatgcaagtcgaacggcagcacgggagcttgctcctggtggcgagtggcgaacgggtgagtaacatatcggaacgtacctagtaatgggggataactagtcgaaagattagctaataccgcatacgccctgagggggaaagcgggggatcgtaagacctcgcgttattagagcggccgatatctgattagctagttggtggggtaaaagcctaccaaggcgacgatcagtagctggtctgagaggacgaccagccacactggaactgggacacggtccagactcctacgggaggcagcagtggggaattttggacaatgggcgcaagcctgatccagccattccgcgtgagtgaagaaggccttcgggttgtaaagcgctttcgcaagggaagaaacgatgcagtcgaataaactgcgttaatgacggtaccttgataagaagc

SEQ ID NO: 9896 - DNA, 490 bp, unidentified
  misc_feature 1..490: note = Ascusbbf_1323967, encodes 16S rRNA
  source 1..490: mol_type = genomic DNA
agagtttgatcctggctcaggatgaacgctagcggcaggcttaacacatgcaagtcgaggggtaacgcggggtagcactactctggctacgaccggcgcacgagtgcgtaacgcgtatgcaacctccctgtgacacggatataacggagagcaattttcactaatccccaatatttttattctttcgcatattaggataactaaagcttcggtggttacggattggcatgcgtgacattagctatttggtaaggtaacggcttacccaggcgacgatgtctaggggagctgcgaggcatatcccccacactggtactgagacacggaccagactcctacgggaggcagcagtgaggaatattggtcaatggacggaagtctgaaccagccatgccgcgtggaggaagaaggtcctatgggttgtaaactccttttgttcgagggtaataagggcgatgcgaagcccgatgagagtatcggacgaataagc

SEQ ID NO: 9897 - DNA, 471 bp, unidentified
  misc_feature 1..471: note = Ascusbbf_1259286, encodes 16S rRNA
  source 1..471: mol_type = genomic DNA
agagtttgatcatggctcagaacgaacgctggcggcatgcttaacacatgcaagtcgaacgagggcttcggccctagtggcgcacgggtgagtaacgcgtaggtatctgccttgaagtggggaataacggtggaaaactgccgctaatgccgcatacgccctgagggggaaagctttatgcgctttgagaggagcctgcgtccgattaggtagttggtggggtaacggcctaccaagcccgcgatcggtagccggtctgagaggacgatcggccacactgggactgagacacggcccagactcctacgggaggcagcagtggggaatattggacaatgggcgcaagcctgatccagcaatgccgcgtgagtgatgaaggccttcgggttgtaaagctcttttgccgatgacgatgatgacggtagtcggcgaataagccccggctaacttcgtgccagcagccgcggtaat

SEQ ID NO: 9898 - DNA, 487 bp, unidentified
  misc_feature 1..487: note = Ascusbbf_1323984, encodes 16S rRNA
  source 1..487: mol_type = genomic DNA
agagtttgatcatggctcagaacgaacgctggcggcaggcttaacacatgcaagttgagcgggattaattgatagcttgctattgattatgagagcagcgcactggtgagtaacacgtgggcacataccttttggtgtgggacaacagttggaaacgactgctaataccgcatcagccctaagggggcagatttatttccgaaagattggcccgcggacgattaggtagtaggtggggttacgtcccacctagccgacgatctatagctggtctgagaggacgattcgccacattggaactgagacacggtccagactcctacgcgaggcagcagtgaggaatattgggcaatggaggaaactcggacccagccatgccgcgtgagtgaagaaggttttcggattgtaaagctctttcagacgggaagatgatgacggtaccgtcagaagaagcaccggctaacttcgtgccagcagccgcggtaat

SEQ ID NO: 9899 - DNA, 490 bp, unidentified
  misc_feature 1..490: note = Ascusbbf_1377277, encodes 16S rRNA
  source 1..490: mol_type = genomic DNA
agagtttgatcatggctcaggatgaacgctagcgacaggcctaacacatgcaagtcgaggggcagcgcgggagaagcttgcttttcctggcggcgaccggcgcacgggtgcgtaacaggtgtgcaatctgtccatagtcggggaatagcccagcgaaagttggattaatgctccatgtgtcacgacgccgcatgactttgtgatgaaacgtacggactatgggtgagcacgcttccgattagatagttggtgaggtaacggctcaccaagtcgccgatcagtaggggttccgagaggaagggcacccaaatgcgaacacagacaaggtcccaacgccagcgggaaggagcagtgaggaagaatggggaaagggcgagaggccgaaccagccagttcgcgtgaaggatgaagggtctagggagtgtaaacgtctttggtccgagggtaaaaaaggccacgggtggcttcttgcaagtatcggacgaataag

SEQ ID NO: 9900 - DNA, 490 bp, unidentified
  misc_feature 1..490: note = Ascusbbf_1347057, encodes 16S rRNA
  source 1..490: mol_type = genomic DNA
agagtttgatcatggctcaggatgaacgctagcggcaggcttaacacatgcaagtcgaggggtaacgcggggtagcaatactctggcgacgaccggcgcacgggtgcgtaacgcgtatgcaacctacctgtaacagggggataacggagagaaatttcgactaatcccccatattgttagagattcgcatgtttctctaacgaaagcttcggtggttacggatgggcaggcgtgacattagctagttggtagggtaacggcttaccaaggcgaagatgtctaggggagctgagagtcttatcgcacacacgggtactgggacacggaccagactcctacgggaggcagcagtgaggaaaattgagcaatggacggaagtctgaaccagccatgccgcgtggaggaagaaggtgctatgggttgtaaactccttttgttcgagagtaataaggggctggcgagcctcgatgagagtatcggacgaataagc

SEQ ID NO: 9901 - DNA, 490 bp, unidentified
  misc_feature 1..490: note = Ascusbbf_1347145, encodes 16S rRNA
  source 1..490: mol_type = genomic DNA
agagtttgatcctggctcaggatgaacgctggcggcgcgcttaacacatgcaagtcgaacggagttatctcgctgagtagagcttgctcaaatcttgagataacttagtggcggacgggggagtaacgcttggataacctgccttatactgggggataacacttataaataggtgctaataccgcataagcgcacgttcccgcaggcgaaagggtggaaaactcgcgtggtgtaagatggatcggggtcggattagatagttggcgaggtaacggcccaccaagtcaacgatcagtagccgacctgagagggggaacggcaacattgggcctcggacacgacccaaactcatacgggaggcagcggtggggaatattgcacaatgggggacaccctgatgcagcgccgccgcgtgggtgaagaagtatgtcggtatgtaaagctctatcagcaaggaagcaaaaaatgacggtacttgactaagaagccc

SEQ ID NO: 9902 - DNA, 490 bp, unidentified
  misc_feature 1..490: note = Ascusbbf_1377363, encodes 16S rRNA
  source 1..490: mol_type = genomic DNA
agagtttgatcatggctcagagcgaacgctagcggaatgctttatacatgcaagtcgaacggattttgatctttgtcgcaatacaaagattacgattagtggcgaacgggtgagtaatagttaggaacttgccgaatagtgggggacaacagttagaaatgactgctaataccgcatactcccgagaggggctagatgttttgctattcgagaggcttaaccacgaatagcgtgttggcggggtaattgcccaccaaggcagtgatcgttagccgaccttagaggatgatcggccacattgggaccgagacacggcccagactcctacggtaggcagctgtacggaatattggacaatggacgcaagtcggatccagcaatcccgcgggagtgatgaaggtgttatgcatggtaaaactcttttgcccatgaagacaatgacggtagtgggagaataagcaccgactaactacgtgccagcagccgcggt

SEQ ID NO: 9903 - DNA, 490 bp, unidentified
  misc_feature 1..490: note = Ascusbbf_1446139, encodes 16S rRNA
  source 1..490: mol_type = genomic DNA
agagtttgatcctggctcaggatgaacgctagctacaggcttaacacatgcaagtcgaggggtaacgtcagcgaaactttgctctttctacgcgaccagcggcgagtgggtgtgacacgcgtacaccccccgccgcaccctaggacacacccttgagacagtaagtataatgctctatcttctgtttcggggtcatgtgatttgcagaaaaggattagagctttgcgatggggatgcggttgtttaggttgttgggggggtacaggcccaccaagccgagggttagtgggggttctgagcggaagatccccaacattggaactgagacacggtccaaactcctacgggaggcagcagtgaggaatattggtcaatgggcgagagcctgaaccagccaagtagcgtgcaggacgaatgccctacgggttgtaaaccgcttttgcggaggaataaaatatgcgacgtgagaggcattgcaggtactccgcga

SEQ ID NO: 9904 - DNA, 490 bp, unidentified
  misc_feature 1..490: note = Ascusbbf_1347106, encodes 16S rRNA
  source 1..490: mol_type = genomic DNA
agagtttgatcctggctcaggatgaacgctagcggcaggcttaacacatgcaagtcgaggggcagcgcggggtggcaatcctctggcggcgaccggcggaagggtgcgtaacgcgtgagcaacttgcccgtcactgggggataggcactggaaacggtgtgtaatactccataacatatggattcacatggatttatattgaaagactcgttggtgacggatgggctcgcgtaacattagctagtcggcggggtaacggcccaccgaggctacgatgtttaggggttctgggaggaaagtccccaaccatggaactgggagaacggtccaaaacccaacggcgggcgccagtggggaaaatgggtcaatgggcggaagcctgaacaagccatgcggcgggcaggaataaggccctatgggtcgtaaactgcttttccgtgagggaaataaggggaacgtgtggcccgatgagagtatcaggggaataagc

SEQ ID NO: 9905 - DNA, 488 bp, unidentified
  misc_feature 1..488: note = Ascusbbf_1347100, encodes 16S rRNA
  source 1..488: mol_type = genomic DNA
agagtttgatcatggctcagaacgaacgctggcggcaggcttaacacatgcaagttgagcgggattgattgatagcttgctattgatcatgagagcagcgcactggtgagtaacacgtgggaacataccttttggtgggggacaacagttggaaacgactgctaataccgcataagccctgagggggaagattaattgccgagagattggcccgcgggagatttggtaggagggggggtgaacggcttacttgccggacgatctttggctggtctgagagaacgttcagccccattggaactgagacacggtccagactcatacgggaggcagcagtgaggaatattgggcaatggagggaactctgacccagccatgccgcgtgagtgaagaaggttttcggattgtaaagctctttcagacgggaagatgatgacggtaccgtcagaagaagcaccggctaacttcgtgccagcagccgcggtaat

SEQ ID NO: 9906 - DNA, 490 bp, unidentified
  misc_feature 1..490: note = Ascusbbf_1347115, encodes 16S rRNA
  source 1..490: mol_type = genomic DNA
agagtttgatcctggctcaggatgaacgctagcggcaggcttaacacaagcaagtcgaggggtaacgcggggtagcaatactctggcgacgaccggcgcacgggtgcgtaacgcgtatgcaacctacctgtaacaggggtataacggagagaagtttccactaatcccccatattgggatgctggcgcaggttaggataacgaaagcttcggtggttacggatgggcatgcgtgacattagctagttggtaaggtaacggcttaccaaggcgacgatgtctaggggagctgagaggcttatccccaacactgggactgagccccccaccagactcctacgggaggcagccctccggaatattggtcaatggacggaagtctgaaccagccatgccgcgtggaggaagaaggtcctatgggttgtaaactccttttgttcgagagtaataagaggcttgcgagcctcgatgagcgtatcggacgaataagc

SEQ ID NO: 9907 - DNA, 485 bp, unidentified
  misc_feature 1..485: note = Ascusbbf_1446070, encodes 16S rRNA
  source 1..485: mol_type = genomic DNA
agagtttgatatggctcagaacgaacgctggcggcaggtcttaggcatgcaagtcgaacggacgacagagtggcttgccattctgaagttagtggcgcacgagtgagtaacgcgtgggaaactgcccttcactggggaataacgtctggaaacgacggctaataccccatacgccggcaagggaaaagctttctcggtgagggttgggcccgcgtgggtttagcttgttggtggggtaatgtcctaccaaggcgatgatccatagcgggtctgagaggacgatcagccacgctggaactgggacacggtccagactcctacgggaggcagcagctaagaatattgggcaatggaggaaactctgacccagccatgccgcgtgaatgaagaaggccttcgggttgtaaagttcttttagtcatgaagatgatgacagtagtgacagaaaaagcaccggctaacttcgtgccagcagccgcggtaat

SEQ ID NO: 9908 - DNA, 350 bp, unidentified
  misc_feature 1..350: note = Ascusbbf_1346978, encodes 16S rRNA
  source 1..350: mol_type = genomic DNA
agagtttgatcctggctcagaacgaacgctggcggcgaggctgaagcatgcaagtcgagcgggaggggcagcgaggccccgagagcggcggacgggggaggaacgcgcggacaaccgaccctccggcgggggagagccgagcgaaagcgcggagaacaccgcaggagacggagcgggggcggccctgcgccgggaaagcgcctgcgggcgcgccgggggacgggcgttgggcgcagcagcgtggtggcgtcgttttcgcgggggggcgcgaccgtggcagggaatgggcgcggggtgccgcggcccgaggaatacgccccggcaacctccgtgccagcagccgcggtaat

SEQ ID NO: 9909 - DNA, 490 bp, unidentified
  misc_feature 1..490: note = Ascusbbf_1377186, encodes 16S rRNA
  source 1..490: mol_type = genomic DNA
agagtttgatcatgactcaggatgaacgctggcggcgtgcctaacacatgcaagtcgaacggaaaggattcttcggcattcttttagagggggacgggtgagtaacgcgtgggtaacctgccccatacaggggaacaacagctgtaaacggctgctaataccgcataagcgcacagtactgcatggtacagtgtgaaaagattttatcggtatgggatggacccgcgtctgattggctcgttggaggggtaacggcccaccacggcgacgctcagtcgccgacctgagagggtgaccggccacattggggctgagacacggaccaaactccgacgggaggcagaagtggtggatattgcacgatgggcggaagcctgatgcagcgacgccgcaggagtgaggaagtattgcggtatgtgaagctctatcagcagggaagaaaatgactgtacctgaataagaagccccggctaactacgtgccagcagcc

SEQ ID NO: 9910 - DNA, 490 bp, unidentified
  misc_feature 1..490: note = Ascusbbf_1377234, encodes 16S rRNA
  source 1..490: mol_type = genomic DNA
agagtttgatcctggctcaggatgaacgctagcgataggcctaacacatgcaagtcgaggggcagcacatgaagtagcaatacggctggtggcgaccggcgcacgggtgcgtaacgcgtatgcaatctacctacaacaagggaataacccgttgaacgacggactaataccctataaaacaggggtcccgcatgggaatatttgttaaagatttatcggttgtatatgagcatgcgttccattagcttgttggtgagataacggcccaccaaggcaacgatggatagtgtaactgagaggttgatcgcgcacactggtactgtgacacgaaccagactcctacggaaggcagaagtgaggaatattggtcaatggacgaaagtctgaaccatccacgtcgcgtgaaggaagacggccctacgggttgtaaacttcttttgtaagggaataaagtgagtcacgtgtgactttttgcatgtaccttacgaat

SEQ ID NO: 9911 - DNA, 490 bp, unidentified
  misc_feature 1..490: note = Ascusbbf_1323559, encodes 16S rRNA
  source 1..490: mol_type = genomic DNA
agagtttgatcatggctcaggatgaacgctagcggcaggcttaacacatgcaagtcgaggggcagcgcggggtagcaatactctggcggcgaccggcgggagggtgcgtaacgcgtgagcaacttgcccgtcactgggggataggcaccggaaacggtgtgtaatactccataacatatggattcacatggatttatattgaaagattcgttggtgacggatgggctcgcgtaacattagctagtcgaaggggtaacggcccaccgaggctgagatgtttaggggttctgagaggaaggtaccacaacatgtacatgagacacggtccagactcctacgggaggcagcagtgaggaatattggtcaatgggcggaagcctgaaccagccaagcagcgtgcaggaagaaggccctatgggtcgtaaactgcttttccttgggaacaatgaggggcacgtgtggcccgatgaaagtatcaggggaataagca

SEQ ID NO: 9912 - DNA, 490 bp, unidentified
  misc_feature 1..490: note = Ascusbbf_1377160, encodes 16S rRNA
  source 1..490: mol_type = genomic DNA
agagtttgatcatggctcaggacgaacgctggcggcgcgcttaacacatgcaagtcgaacggtgaacagcggaaagcttgcttttagctgtacatagtggcggacgggtgagtaacgcgtgaggacttgtcctgtacagggggacaactgatggaaacgtcagctaataccccataagccgtgaggtaaaaggagcgatccggtacaggagagactcgcgttctatcagttagttggtgaggtaacggctccccaaggcgaagacggatagccggactgagaggttggccggccacattggaactgggatacagtccaggcgcctgcgggaggaagcgggaaggaatattggggaatgggggagacactgacccagcgacgcggcgtgagagaagaaatcactcgggatgtaaagctctgttaggcgggaagaaggaagtgacggtaccgcacgaggaagccacggcaaactacgtgccagcagccgcgg

SEQ ID NO: 9913 - DNA, 486 bp, unidentified
  misc_feature 1..486: note = Ascusbbf_1446124, encodes 16S rRNA
  source 1..486: mol_type = genomic DNA
agagtttgatcatggctcagaacgaacgctggcggcaggtcttaggcatgcaagtcgaacggacgacagagtggcttgccattctgaagttagtggcgcacgagtgagtaacgcgtgggaaactgcccttcactggggaataacgtctggaaacggacgctaataccgcatccgcccgccagtggcaagatttatctgtaagggctgttcccgcgttggattagctttgcgtgggggtaatggcctaccaaggcgcttatccatatcttgtctgcgaggacgatccgccacgctggaactgagacacggtccagacgcctacgggaggcagcagctaagaatattgggcaagggaggaaactctgacccagccatgccgcgtgaatgaagaaggccttcgggttgtaaagttcttttagtcatgaagatgatgacagtagtgacagaaaaagcaccggctaacttcgtgccagcagccgcggtaat

SEQ ID NO: 9914 - DNA, 490 bp, unidentified
  misc_feature 1..490: note = Ascusbbf_1347141, encodes 16S rRNA
  source 1..490: mol_type = genomic DNA
agagtttgatcctggctcaggatgaacgctagctacaggcttaacacatgcaagtcgcggggcatcatggcatgtagcaatacatgctgatggcgaccggcggatgggtgagtaacgcgtatccaacctggccctatctcgggtacagcccctcgaaagagggattaattcccgatgttccctgggatccgcatgttttccagggcaaaggcatttgtcggatagggatggggatgcgttccattaggcagacggcggggtaacggcccacggagcctacgagggataggggttctgagaggaagggcaccaaagctgggagtgagacacggcacggactcctacggcaggcagcagtgaggaatattggtgaatggcggtaacgctgaaccagcaaagtagcgtgagggagtacggccctatgggttttaaacctcttttgttagggagcaaccggtggcactagggccattctgcgagtacctttcga

SEQ ID NO: 9915 - DNA, 490 bp, unidentified
  misc_feature 1..490: note = Ascusbbf_1377172, encodes 16S rRNA
  source 1..490: mol_type = genomic DNA
agagtttgatcctggctcaggacgaacgctggcggcatgcttaacacatgcaagtcgaacggacggattccgtcgggatgaaagttagtggcgaacgggggaggaatgtacgagcaacctgccgctggcaacgggagaacagggggaaacgacggctaatacggtataagaccacggcaccgcatggtgcggcggtaaaagatttttcggacagagatgggctcacatccctttagcgagttggtgagataatagcccaccaaggcgacgaggggtagccgagcggagaggctgatcggccacattgggactgaaacccggcccagactcctccgggaggccgcagtcgggaatagtgggccatggaggaaccgctgacccagcaatgccgcgtgcgcgaggaaggtacttttcttgtaaagctcttttctcaggaacgaataaagatgacggtacctgaggaataagccccggctaactacgcgccagc

SEQ ID NO: 9916 - DNA, 490 bp, unidentified
  misc_feature 1..490: note = Ascusbbf_1346990, encodes 16S rRNA
  source 1..490: mol_type = genomic DNA
agagtttgatcctggctcaggacgaacgctggcggcatgcctaacacatgcaagtcgaacggagaggaggtcgggaatcttagtggcgaacgggtgaggaacgcgtaggcaacctgccctggaggtggggacaacatcccgaaaggggggcgaataccgaatgggagcgctttcccgcatgagagagcgaggaaagatggcctctatggataagctatcgctaaaggaagggcctgcgtctgcttagcgagttggtggggtaacggcctaccaaggcgatgatcagtagccggtctgagaggtggaacggcagaattgggcctgcgcaaaggccccgacgccgacgggagcccgcaaggggggctcttccggccttggcgcaagcctgacggcgcaaagccggctgagtgctgaaggaattcgttccgtaaagctcgtttgtttatgacgaatgtgcagactgtgaataatggtttgtaatgacggtagt

SEQ ID NO: 9917 - DNA, 490 bp, unidentified
  misc_feature 1..490: note = Ascusbbf_1323627, encodes 16S rRNA
  source 1..490: mol_type = genomic DNA
agagtttgatcatggctcaggatgaacgctggcggcgtgcttaacacatgcaagtcgaacggagttatctcgctgaggagagctttctcaaatcttgagataacttcgtggcggacgggtgcgtaccgcgtggctaacctgccttatacttggggataacacttagaaataggtgctcataccgcataagcgcccgttcccgcatgggaaagtgtgaaaaactccggtggtgtaagctggatcctcgtctgattagatagtttgtgcggtaacggcccaccaagtcaacgatcagtagccggactgtaggggtgaacggcaacagtgggactgagaaacggcccaaactcctacgggaggcagcagtggggaagagtgcaaaatgggggaaacccggatgcagcgacgccgcgtgagggaagaagtatgtcggtagggaaagctagatcagcaaggaagaaaaaaatgacggtacttgactaagaagccc

SEQ ID NO: 9918 - DNA, 490 bp, unidentified
  misc_feature 1..490: note = Ascusbbf_1377181, encodes 16S rRNA
  source 1..490: mol_type = genomic DNA
agagtttgatcctggctcaggataaacgctggcggcgcacataagacatgcaagtcgaacggactcaacgcattcgtaacgattgagagcggttaggggcggacgggggaggaatgcataagtaacctgcctatcagaggggaaccacagctggaaacgactgctaataccgcatacgccccgatcatcacatggttcaagtgggaacggaccaatccgctaatagatggacttagatctgattgtctagttggtggggtaacggcctaccaaggcgacgatcagtagccggactgcgagggtaaacggccgaaatgggactgagatacggcccagactccgaagggaggcagcagtcgggaatagtgcgcaatggaggaaactctgacgcagtgacgccgcgtgcaggaagaaggttttcggattgtaaacggctttagacagggaagaaaaaagacggtaccgggagaataagctccggctaactacg

SEQ ID NO: 9919 - DNA, 490 bp, unidentified
  misc_feature 1..490: note = Ascusbbf_1323525, encodes 16S rRNA
  source 1..490: mol_type = genomic DNA
agagtttgatcctggctcaggatgaacgctagcgataggcctaacacatgcaagtcgaggggcagcacatgacgtagcaatacagatggtggcgaccggcgcacgggtgagtaacacgtatgcaacctaccttcaacaggggaataacccgtcgaaagacggactaataccccataatacagggctccctcatgggaatatttgttaaagatttatcggttgaagatgggcatgcgttccattagctagttggtgaggtaacggctcaccaaggcaacgatggataggggaactgagaggtcgaacgcacacactgggaatgagacacagaacggactactacgggacgaggcagggaggaatattggtgaagggaggcagcgttgaacaagccatgtcgcatgaaggatgacggctctacgggttgtaaacttcttttttaagggaataaagttaggtacgtgtagctatttgcatgtaccttacgaat

SEQ ID NO: 9920 - DNA, 490 bp, unidentified
  misc_feature 1..490: note = Ascusbbf_1323696, encodes 16S rRNA
  source 1..490: mol_type = genomic DNA
agagtttgatcatggctcaggacgaacgctggcggcatgcttaacacatgcaagtcgaacggacggattccgtcgggatgaaagttagtggcgaacgggggaggaatgtatgagcaacctgccgcggtcaacgggagaacagtgggaaacgacggcgaatacagtagaagaccacggcaccgcatggtgcggcggtaaaagatgtgtcggacagagaggggcgcagaccccattagctagttggtgagataatagcccaccaaggcgacgaggggtagccgagctgagagacggatcggcccccttgggactgcaccacggcccagactcctacgggcggccgcagtggggactattgggcaatggcggaaactctgaccccgcactgccgcgtgcgcgatgaaggtccttttcttgtccagctcttttctcaggaacgcataaagatgacggtacctgaggaataagccccggctaactacgtgccagc

SEQ ID NO: 9921 - DNA, 485 bp, unidentified
  misc_feature 1..485: note = Ascusbbf_1378078, encodes 16S rRNA
  source 1..485: mol_type = genomic DNA
agagtttgatcctggctcagaacgaacgctggcggcaggtcttaggcatgcaagtcgaacggacgacagagtggcttgccattctgaagttagtggcgcacgagtgagtaacgcgtgggaaactgcccttcactgggaataacgtctggaaccggacgctaatcccgcctacgcccgcaaggggaaagatttatcggttttggatttgcccgctttggattatcttgttggtggggtaattgcctaccaatgcgatgatccatatctggtcgtagaggacgatcagccacgcgggaactgagaaacggtccagacgcctacgggaggcagcagctaagaatattgggcaatggaggaaactctgacccagccatgccgcgtgaatgaagaaggccttcgggttgtaaagttcttttagtcatgaagatgatgacagtagtgacagaaaaagcaccagctaacttcgtgccagcagccgcggtaat

SEQ ID NO: 9922 - DNA, 490 bp, unidentified
  misc_feature 1..490: note = Ascusbbf_1323700, encodes 16S rRNA
  source 1..490: mol_type = genomic DNA
agagtttgatcctggctcaggacgaacgctggcggcgtgcttcatacatgcaagtcgaacgagaagctctagcttgctagagtggaaagtggcggacgggtgagtaatatgtaggaaatctgccctagtgagggggacaacagagagaaacttctgctaataccccatatgagcttggttgcaataccaatcttgaaaactccgttgctctaggatgagccttcatctaattcgcttgttggtggtgtaatggactaccaaggcgacgatcagtagctggtttgagaggatgatcagccaaaaggggaatgggacacggcccatactcctacgggaggcagcagtagggaatgttgcgaaatgggcgaaagcctgacgcagcaacgccgcgtgaatgatgaagcccttcggggtgtaaaattctgtcagtggggacgaattttgacggtacccacagaggaagcaccggctaactccgtgccagcagccg

SEQ ID NO: 9923 - DNA, 490 bp, unidentified
  misc_feature 1..490: note = Ascusbbf_1323725, encodes 16S rRNA
  source 1..490: mol_type = genomic DNA
agagtttgatcatggctcaggatgaacgctagcggcaggcttaacacatgcaagtcgtacggcagcgcggggtagcaagactctgtcggcgaccgtcggaggggggcgtaacacgtgagcaactttcccggcactggggggtaggcgctggaaacgttgtgtaataccccctaatatatggactcacatggattcatattgaaagattcgttggtgacggatgggctcgcgtaacattagctagtcggcggggtaacggcccaccgaggcgacgatgtttggggggtctgagaggaaggtaccatagaatggaagtaaggaacgaaccagactcgtacgggaggaaggagggaggaagcttggtgaatgggacgaagcctcaaccagccatgctgcgtgcaggaataaggcccgatgggtcgtaaactgcttttcgtggagggcaatacgtgtaacgaggggtcagatgagagtatcaggggaataagca

SEQ ID NO: 9924 - DNA, 490 bp, unidentified
  misc_feature 1..490: note = Ascusbbf_1378048, encodes 16S rRNA
  source 1..490: mol_type = genomic DNA
agagtttgatcctggctcaggatgaacgctagctacgggcttaacacatgcaagtcgaggggcagcataacgaaagcttgcttttgtttatggcgcccggcgcacgggtgagtaacgcgtatccaaccttccccttagtatggcatagcccggcgcaagtcggattaataccctatgttttccgttgaggacatctcaaatgggacgaagagttatcgctaagggatgtgggggcgtctgatttggttgtgtgcggggtaacggccccccacaccatcgatcagtagggggtctgagaggaaggtaccccacattggaactgagacacggaccaaactcctacgggaggcagcagtgaggaatattggtcaatgggcgagagcctgaaccagccaagtagcgtgcaggatgacggccctatgggttgtaaactgcttttgcatgggaataaagtgagggacgtgtccctttttgtgtgtaccatgagaat

SEQ ID NO: 9925 - DNA, 488 bp, unidentified
  misc_feature 1..488: note = Ascusbbf_1342112, encodes 16S rRNA
  source 1..488: mol_type = genomic DNA
agagtttgatcctggctcagaacgaacgctggcggcaggcttaacacatgcaagttgagcgggattgattgatagcttgctattgatcatgagagcagcgcactggtgagtaacacgtgggaacataccttttggtgggggacaacagttggaaacgactgctaataccgcataagccctgagggggaaagattaattgccgagagattggcccgcggaagattaggtagtaggtggggtaacggcctacctagccgacgatctatagctggtgtgagaggacgagcagccacattggaactgagacacggtccagactcctacgggaggcagcagtgaggaatattgggcgagggagagaacgctgacccagccaggccgcgagagagaaggaggttgtcgtattgtaaagctctttcaggcgagaagatgatgacggtaccgtcagaggaagcaccggctaactacgtgccagcagccgcggtaat

SEQ ID NO: 9926 - DNA, 490 bp, unidentified
  misc_feature 1..490: note = Ascusbbf_1323690, encodes 16S rRNA
  source 1..490: mol_type = genomic DNA
agagtttgatcctggctcaggatgaacgctagctacaggcttaacacatgcaagtcgaggggcagcataacgaaagcttgcttttgttgatggcgaccggcgcacgggtgagtaacgcgtatccaaccttccccttagtagggcctagcccggcgaaagtcggattaatactctttgttttccgttgcggacatctgaggtggaatatagatttatcgctaagggttggggatgcgtgtgattcggtggttggcggggtttcggcccaccaagccatcgatcagtaggggttctgagagggaggtgccacacgttggagcatagagacggaccaaagtcctacgggaggacgaagtgcggaagattggtcaatgggcgagagcctgagccagccaagtagcgtgcaggatgccggccctatggattgtaaactgcttttgcatgggaataaagtgagagacgtgtccctttttgtatggaccatgggaat

SEQ ID NO: 9927 - DNA, 490 bp, unidentified
  misc_feature 1..490: note = Ascusbbf_1378006, encodes 16S rRNA
  source 1..490: mol_type = genomic DNA
agagtttgatcctggctcaggatgaacgctagcggcaggcttaacacatgcaagtcgaggggcagcgcggtgtagcaatactctggcggcgaccggccgaagggcgcgtaacgcgtgagcaacttgcccgtcactgggggatgggcactggaaacggtgtgtgatactcaataacatttggattcacatggcttcatattgaaagattagttggtgaccgatgggctcgcgtaacattagctagtcggcgtggtaagggcccaacggggctacgatgtgtaggggttctgagaggaaggtcccccacactggaactgagacacggtccagactcctacgggaggcagcagtgaggaatattggtcaatgggcgaaagcctgaaccagccaagccgcgtgcaggaataaggccctatgggtcgtaaactgcttttccttgaggacaataagggtcacgtgtggcccgatgagggtatcagatgaataagga

SEQ ID NO: 9928 - DNA, 490 bp, unidentified
  misc_feature 1..490: note = Ascusbbf_1378005, encodes 16S rRNA
  source 1..490: mol_type = genomic DNA
agagtttgatcctggctcaggataaacgctggcggcgcacataagacatgcaagtcgaacggacttaactcattcttaacgattgagagcggttagtggcggactggtgagtaatgtataagtaacctgcctatcagaggggaacaacagttggaaacgactgctaataccgcatatgccacgagaatcacatggtccaagtgggaaaggagcaatccgctgatagatggacgtatatctgatcagctggttggtggggtaacggcctaccaaggcgacgatcagtagccggactgagaggtttaacgggcacaatgggaatgggatacgggccagactcctaagggaggcagcaggtgggaataattcgaaatggaggaaaacctgacgcagtgacgccgcgggcaggaagaaggttttcggattgtaaactgctttagacagggaagaaaaaagacagtacctgtagaagaagctccggctaactacg

SEQ ID NO: 9929 - DNA, 490 bp, unidentified
  misc_feature 1..490: note = Ascusbbf_1377991, encodes 16S rRNA
  source 1..490: mol_type = genomic DNA
agagtttgatcctggctcaggatgaacgctggcggcgtgcctaatacatgcaagtcgaacgaggtttctcttcggggaaacctagtgtcgaacgggtgagtaacacataggtaatctacctttcagaatgggatacccaagagaaattttggctaataccgtatacaatcatttctccgcatgtagatttgatgaaagtggctccaaagcctcgctgttagatgaacctgtgacacattatctagttggtgaggtaacaacccaccaaggcgaagatgtgtagctgatctgagaggataatcgggcacaatggtactgcacaacggaccatactccaacgggaggaagcagtagggagttttcggaaatgggggaaaccctgaccgagaaacgccgagtgatttagaaggccctctgggtcgtaagaatctgttgtaaaggagaaatggtagtgggaggaaatgcccattatttgatagtactttattag

SEQ ID NO: 9930 - DNA, 490 bp, unidentified
  misc_feature 1..490: note = Ascusbbf_1342025, encodes 16S rRNA
  source 1..490: mol_type = genomic DNA
agagtttgacatggctcaggatgaacgctagcgataggcctaacacatgcaagtcgaggggcagcacatgaagtagcaatacagatggtggcgaccggcgcacgggtgagtaacgcgtatgcaacctacctacaacaggggaataactcgttgaaagacggactaataccccataatacagggatcccgcatgggaatatttgttaaagatttatcggttgtagacgggcatgcgttccattagctagttggtgaggtaacggctcaccaaggcaacgatggataggggaactgagaggtttatcccccacactgggaacggggaacggaccagactcctacgggaggcagcaggggggaaaaattgccaatggacgcaggtctgaaccagcccagtcgcgtgaaggaagaaggccctacgggttgtaaacttcttttgtaagggaataaagtgagccaagtgtggctttttgcatgtaccttacgaata

SEQ ID NO: 9931 - DNA, 490 bp, unidentified
  misc_feature 1..490: note = Ascusbbf_1342039, encodes 16S rRNA
  source 1..490: mol_type = genomic DNA
agagtttgatcctggctcaggacgaacgctggcggcgtgcttcatacatgcaagtcgaacgggaagctgacttcggtctgtggatagtggcggacgggtgagtaatatgtaggtaatctgcctcagagagggggacaactgggggaaactcttgcttatacaccatatgagcttggctgcaatgccaatctttagaactccggtgctctgcgatgagccggaatctgattggcttgttggcggtttgatggaccaccaagtcgacgatcagtagctggttacagaggaggaacagccacaatgggaccgagacaacgcccaaactccaacgggaggcagcagtagggaattatgcgcaatgggcgaaagcctgacgcagcaacgccgcgtgtgagatgacacccttcgggatggaaaacactgtcagtagagacgaaacttgacggtacctacagaggaagcaccggctaactccgtgccagcagccgcg

SEQ ID NO: 9932 - DNA, 490 bp, unidentified
  misc_feature 1..490: note = Ascusbbf_1323777, encodes 16S rRNA
  source 1..490: mol_type = genomic DNA
agagtttgatcctggctcgggatgaacgctggcggcgtgcttaacacatgcaagtcgaacggagttatctcgctgaggagagcttgctcaaatcttgcgataacttagtggcggacgggtgagtaacgcgtggatcacctgccttataccgggggataacacttagaaataggtgctaatcccgcataagcgcccgatcccgcatgggaaagtgtgaaaaactccggtggtataagatgactccgcgtctgattagctagttggtgaggtaacgtccaaccaagtcaacgatcaatagccggcctgagagggtgaacggcaacattgggactgagacacggcccaaacgcctacgggaggcagcagtggggaatattgcacaatgggggaaaccctgaggcagcgacgccgcgtgagtgaagaagtatttcggtatggaaagctctatcagcaaggaagaaaaaatgacggtacttgactaagaagcccc

SEQ ID NO: 9933 - DNA, 490 bp, unidentified
  misc_feature 1..490: note = Ascusbbf_1342036, encodes 16S rRNA
  source 1..490: mol_type = genomic DNA
agagtttgatcatggctcagagcgaacgctggcggcaggcctaacacatgcaagtcgagcgcccgtagcaatacgggcgcggcagacgggagagtaacacgtgggaccgtacccttcagttcggaataacccggggaaactcggactaataccgaatacgtccgtaaggagaaagatttatcgctgaaggatcggcccgcgtctgattagctagttggtggggtaatggctcaccaaggcgacgatcagtagctgttctgagaggaaggccccccacactgggactgagacacggcccagactcctacgggaggcagcagtgaggaatattggtcaatggcggtaacgctgaaccagccaagtagcgtgagggattacggccctatgggttttaaacctcttttgttagggagcaacctatggcactagtgccatactgcgagtacctttcgaataagcatcggctaactccgtgccagcagccgcggta

SEQ ID NO: 9934 - DNA, 490 bp, unidentified
  misc_feature 1..490: note = Ascusbbf_1445236, encodes 16S rRNA
  source 1..490: mol_type = genomic DNA
agagtttgatcatggctcagagcgaacgctggcggcaggcctaacacatgcaagtcgagcgcccgtagcaatacgggagcggcagacgggagagtaacacgtgggaacgtacccttcagttcggaataacccggggaaactcggactaataccgaatacgtccgtaaggagaaagatttatcgctgaaggatcggcccgcgtctgattagctagttggtggggtaatggctcaccaaggcgacgatcagtagctgttctgagaggaaggccccccacactgggactgagacacggcccagactcctacgggaggcagcagtgggaaatatgggtcaatggcggtaaggctgaaccggccaggaggcgtgagggattacggccctaggggttttaaacctcttttgttagggagcaacctagggaactagggcaatactggaagtacctttcgaatagcatcggctaactccgtgccagcagccgcggtaa

SEQ ID NO: 9935 - DNA, 490 bp, unidentified
  misc_feature 1..490: note = Ascusbbf_1378051, encodes 16S rRNA
  source 1..490: mol_type = genomic DNA
agagtttgatcctggctcaggatgaacgctagctacaggcttaacacatgcaagtcgaggggcagcataacgaaagcttgcttttgttgatggcgaccggcgcacgggtgagtaacgcgtatccaaccttccccttagtagggcatagcccggcgaaagtcggattaataccctatgttttccgttgaggacatctgaagtggaacaaagatttatcgctaagggatgaggctcgtctgattagggtgttggcggggtaacggcccaccaagccatcgatcagtaggggttcttagaggaggtgctcacacatcgggattgggaaacggaccaaactccaacgggaggaagcagtgaggaatagtggtcaatgggcgagagcctgaaccagccaagtagcgtgcaggatgacggccctatgggttgtaaactgcttttgcatgggaataaagtgagggacgtgtccctttttgtatgtaccatgagaata

SEQ ID NO: 9936 - DNA, 490 bp, unidentified
  misc_feature 1..490: note = Ascusbbf_1377971, encodes 16S rRNA
  source 1..490: mol_type = genomic DNA
agagtttgatcctggctcagaatgaacgttggcggcgtggattaggcatgcgagtcgtgcgggtgtagcaatacaccagcggcgaaagagacagtaatgtatagattatctgccctcaggacgggaatagcggcgggaaactgccggtaatgcccgataatgtctccggatcaaaggtgtgagtccgcctggggatgagtctatatcctattagctagttggtaaggtaacggcttaccaaggctgtgatgggtagcgggtgtgagagcaggacgcgcgtcattgggactgagacactgcacagaccccgacgggtggctgcagtcgagaatcttcggcaagggacgcaagtcggaccgagcgacgccgcgtgcgggaggaaggccttcgggttgtaaaccgctgtcagtggggaggaaggcttcgtgaagagcgaagtttgacctatccgcagaggaagtgagggctaagctcgtgccagcagccgcgg

SEQ ID NO: 9937 - DNA, 422 bp, unidentified
  misc_feature 1..422: note = Ascusbbf_1377977, encodes 16S rRNA
  source 1..422: mol_type = genomic DNA
agagtttgatcctggctcaggatgaacgctagctacaggcttaacacatgcaagtcgaggggcagcatgtatctggcttgctagctatgatggcgaccggcgcacgggtgcgtaacgcgtatccaacctgccgtttagccgggaacagcccggcgaaagcgagattactacccgatgttgtgcgtagtccgcatggcaggcgcaccacaaggtttaccggtaagcgcccgggatgcgtacgagtagttggtgggaggggtagcggccaccaggcgcaacgcgggtcgggccaagtagcgggcaagacgactgccttacagattgtaaacggcttttatgcgggggtaaagtgtccaactgggggaatagtgctaataccgcatgaaaaaggacggacaaaccccgcgcgacgccgcggtaat

SEQ ID NO: 9938 - DNA, 490 bp, unidentified
  misc_feature 1..490: note = Ascusbbf_1445377, encodes 16S rRNA
  source 1..490: mol_type = genomic DNA
agagtttgatcctggctcaggataaacgctggcggcgcacataagacatgcaagtcgaacgaacttattcgaaagtttactttttaagcgtttagtggcggactggtgagtaacgcgtaagcaatctgcctatcatagtagaataacagtgagaaatcattgctattaccgcatatgctgttagtctctcatgatacaaatagaaaagaagcaatccgctgagagatgagcttgcgtctgattagttagtgggtggaataacggcctaccaagacgatgatcagtagcgggactgagaggttagacggccacattgggactgagcgacggcccagagtcagacgggaggcagcaggcgggaatattgcgcaatggaggaaactctgacgcagggatgccgcgtgcaggaagaagggtttcggagtgtaaactgctttagatagggaagaaaaaatgacggtacctatagaataaggtccggctaactacg

SEQ ID NO: 9939 - DNA, 490 bp, unidentified
  misc_feature 1..490: note = Ascusbbf_1377966, encodes 16S rRNA
  source 1..490: mol_type = genomic DNA
agagtttgatcctggctcaggatgaacgctagctacaggcttaacacatgcaagtcgaggggcagcataacgaaagcttgcttttgttgatggcgaccggcgcacgggtgagtaacgcgtatccaaccttccccttagtagggcatagcccggcgaacgtcggattaataccctatgttttccgttgaggacatctgaagtggaacaaagatttatcgctaagggatgtggatgctgcttattaggtttgttgcggggtaacggcccaccaagccgtctatcagtatgggttctgagagcacgatcacgcacatgaggacgtggaaacggaccacactcctacgggaggccgcagtgaggaatattggtacatgggcgagagcctgaaccagccaagtagcgtgcaggatgacggccctatgggttgtaaactgcgtttgcatgggaataaagtgagggacgtgtccctttttgtatgtaccatgagaat

SEQ ID NO: 9940 - DNA, 490 bp, unidentified
  misc_feature 1..490: note = Ascusbbf_1377897, encodes 16S rRNA
  source 1..490: mol_type = genomic DNA
agagtttgatcctggctcaggatgaacgctagcgataggcctaacacatgcaagtcgaggggcagcacatagagtagcaatacttttggtggcgaccggcggatgggtgagtaacacgtatgcaacctaccttctacagtggaataacccgttgaaagacggactaatgccgcataacacaggggctccgcatggagatatttgttaaagattcatcggtagaagatgggcatgcgtatgattagctagttggtaaggtaacggcttaccaaggcaacggtcattaggggttctgagaggaaggtcagccacactggtacagagacacggaccagactcctacaggaggcagcagcgaggaatagtggtcaatgggcgagagcgtgaaccagccaagttgcgtgaagggagactgtccgatggagtgtaaacttcttgtgtcagagactaaagttaaccacgtgtggttttttgcatgtacctgacgaat

SEQ ID NO: 9941 - DNA, 490 bp, unidentified
  misc_feature 1..490: note = Ascusbbf_1341908, encodes 16S rRNA
  source 1..490: mol_type = genomic DNA
agagtttgatcctggctcaggatgaacgctggcggcgtgcttaacacatgcaagtcgaacggagttatctcgctgaggagagcttgctcaagtcttgagataacttagtggcggacgggtgagtaacgcgtggataacctgccttataccgggggataacacgtagaaataggtgccaataccgcataagcgcacgatcccgcatgggagagtgtgaaaaactccggtgagataagatggatccgcgtctgagtggatagttggtgaggtaagggcccaccaagtcaacgatcagtggccgcctggggaggatgaaaggccagatcggaactgcgacacggcccaaaatcctactgtaggcagcagtggggaatattgcaaaatgggggaaaccctgatgcagcgacgccgcgtgagtgaagaagtatttcggtatgtaaagctctatcagcaaggaagaaaaaaatgacggtacttgactaagaagccc

SEQ ID NO: 9942 - DNA, 490 bp, unidentified
  misc_feature 1..490: note = Ascusbbf_1445402, encodes 16S rRNA
  source 1..490: mol_type = genomic DNA
agagtttgatcctggctcaggatgaacgctagcggcaggcttaacacatgcaagtcgaggggtaacgcggtgtagcactactcttgcgacgaccggcgcacgggtgcgtaacgcgtatgcaacctacctgtaccaggggtataacggagagcaatttccactaatcccccatcttgttattctttcgcatgttcggataacgaacgcttcggtggttacggatgggcatgcgtgccattagctagttggtaaggtaacggcttaccaaggcgacgatgtctaggggagctgggcggcttatcgccaacacgggtactgagaaacggaccagactcctacgggaggcagcagtgaggaattgtggtcaatggacggaaggctgaaccagccatgccgcgtggaggaagaaggtcctatgggttgtaaactccttttgtgcgggagtaataagggcgatgcgaagcccgatgagagtatcggacgaataagc

SEQ ID NO: 9943 - DNA, 490 bp, unidentified
  misc_feature 1..490: note = Ascusbbf_1323905, encodes 16S rRNA
  source 1..490: mol_type = genomic DNA
agagtttgatcctggctcaggatgaacgctagctacaggcttaacacatgcaagtcgaggggcagcataacgaaagcttgcttttgttgatggcgaccggcgcacgggtgagtaacgcgtatccaaccttccccttagtagggcatagcccggcgaaagtcggattaataccctatgttttccgttgtggacatctgaagtggaacaaagctttatcgctaagggatggagatgggtctgattaggttgttggcggggtcacggcccaccaagccatcgatcagtaggggttctgagaggaaggacccccacgttggtcatgagaaacgacacaaactcctacggaaggcagcagtggtgaagattggtagatgggcgggagcctgaaccagccaagtagcgtgcaggatgacggccctatggattgtaaactgcttttgcatgggaataaagtgagggacgtgaccctttttgtatgtaccatgagaat

SEQ ID NO: 9944 - DNA, 490 bp, unidentified
  misc_feature 1..490: note = Ascusbbf_1347197, encodes 16S rRNA
  source 1..490: mol_type = genomic DNA
agagtttgatcctggctcaggataaacgctggcggcgtacataagacatgccagtcgaacggtctcatctcattcttttcgtttttttgctgtcagcggcggactggtgagtaatgctttatcaaccttcctatctgcggggacccacagttggaaacgactgcttataccgcatatgcctcgagaatcacatggttcaagtgggaaaggagccatccgctgatagatggacttatatctgattagctagttggtggggtaacggcctaccaaggcgacgatcagtagccggcctgagcggttaaccggcgaccttggtactgggatccggcccgggctcctacgggaggcagcagtcgggaatattgcgcaatggaggaaactctgacgcagtgacgccgcgtgcaggaagaaggttttcggattgtaaactgctttagacagggaagaaaaacgacagtacctgtagaataagctccggctaactacg

SEQ ID NO: 9945 - DNA, 490 bp, unidentified
  misc_feature 1..490: note = Ascusbbf_1347196, encodes 16S rRNA
  source 1..490: mol_type = genomic DNA
agagtttgatcctggctcaggacgaacgctggcggcatgcctaacacatgcaagtcgaacggaggcggaaacaccttagtgtcgtactggtgagtaacgcgtgagtaacctgccttatacacagggattccagttagaaatgactgctaataccggataagaccacagtccggcatcggacaggggtcaaagtgaattagcggtataagatggtctcgcgtccaattagctagttggtggggtaatggcccaccaaggcaacgattggtagccgacccgagagggtgatcggccacatgggaactgggccccgatccaaactcctgcgggcggccgcagtggggaatattgggcaatggaggaaactcttgcccagcaatgccgcgtgggtgatgaaggtcttatggattgtaaaactctttgattagggacgaacaaatgacggtacctaaagaacaagccccggctaactatgtgccagcagccgcgg

SEQ ID NO: 9946 - DNA, 490 bp, unidentified
  misc_feature 1..490: note = Ascusbbf_1445880, encodes 16S rRNA
  source 1..490: mol_type = genomic DNA
agagtttgatcctggctcaggatgaacgctagctacatgcttaacacatgcaagtcgaggggcggcattggattagcttgctaatcctgatggcgaccggcgcacgggtgagtaacgcgtgtccaaccttccctatagtagcggatagcccggcgaaagtcggattaatacgctatgttgtatttagaggacatctgaagaataccaaaggtttacctctataggatggggatgcgtctggttaggttgttggcgggggaacggcccgccaagccatcgatcagtagggggtctgagagggaaggtccccaccatgggaactgggcaacggtcaaaccccctacggagggaggcagtggggaatatgggtaaatgggcaggagctggaaccggcaaagtagcgtgcaggataacggccttatgggttgtaacctgcttttatcgggggttaaggtgcgggacgcgtgccgtttggtaggaacccgatgaa

SEQ ID NO: 9947 - DNA, 486 bp, unidentified
  misc_feature 1..486: note = Ascusbbf_1324298, encodes 16S rRNA
  source 1..486: mol_type = genomic DNA
agagtttgatcatggctcagaacgaacgctggcggcaggtcttaggcatgcaagtcgaacggacgacagagtggcttgccattctgaagttagtggcgcacgagtgagtaacgcgtgggaaactgcccttcgctggggaataacgtctggaaacggacgctaataccgcatccgcccgcaaggggaaaggtttatcggtgttggaagtgcccgggttggtttagcttgtggttggggtaatggcctacaaaggcgatgtgccttagctggtctgggaggacgatcagccacgctggaactgagacacggtccagactcctacgggaggcagcagctaagaatattgggcaatggaggaaactctgacccagccatgccgcgtgaatgaagaaggccttcgggttgtaaagttcttttagtcatgaagatgatgacagtagtgacagaagaggcaccggctaacttcgtgccagcagccgcggtaat

SEQ ID NO: 9948 - DNA, 490 bp, unidentified
  misc_feature 1..490: note = Ascusbbf_1445866, encodes 16S rRNA
  source 1..490: mol_type = genomic DNA
agagtttgatcctggctcaggataaacgctggcggcgcacataagacatgcaagtcgaacggacttaactcattctttacgattgatagcggttagtggcggactggttagtaatgtataagtaacctgcctatcagatgggaacaacagttggaaacgactgctaataccgcatatgcctcgagaatcacatggttcaagtgggaaaggagcaatccgctgatagagggactaatatctgattagctagttggtggggtaacggcctaccaaggcgacgatcagtagccggactgaggggttaaacggccacactgggaccgagataaggcccagactacgaagagaggcagcagtcgggaagagtgagcaatggaggaaacgctgacgcagagacgccgcgggcaggaagaaggttttcggattgtaaactgctttagaaagggaagaaaaaagacagtacctgtagaataagctccggctaactacg

SEQ ID NO: 9949 - DNA, 490 bp, unidentified
  misc_feature 1..490: note = Ascusbbf_1377470, encodes 16S rRNA
  source 1..490: mol_type = genomic DNA
agagtttgatcctggctcagaacgaacgctggtggcgtgtcttatacatgcaagtcgagcggtccagcaatggatagcggcgaacgggtgagtaacgcgtaagcaatctgccccctgctcgggaatagccgtgccaacgcgcggataataccggatatcgtggggccctgcatagggccttgacaaaagatttatcggcaggggatgcgcttgcgtccgattagctggttggcggggcaacggcccaccaaggcgacggtcggtagccggcctgagagggtgatcggccacagtgggaccgggacacggcccagacgcctaagggaggcagcagtagggaatattgcacaaggggggaaaccctgatgcagcaacgccacgtgtgggaagaagcatttcggtgtgtaaaccacggtcgtgagggaataaggctaattttcggattagttgaatgtacctcgagaggaagcaccggcaaacttcgtgccag

SEQ ID NO: 9950 - DNA, 490 bp, unidentified
  misc_feature 1..490: note = Ascusbbf_1445847, encodes 16S rRNA
  source 1..490: mol_type = genomic DNA
agagtttgatcctggctcaggatgaacgctagcgacaggcttaacacatgcaagtcgaggggcagcatggaggtagcaatacttctgatggcgaccggcgcactggtgagtaactcgcatgcaaccttcctctgcttgggtgataacccgcggaaccgcggcctaataccctgtatgcactgctgcctcctgatgtccgtgtgatagatcttcgtcctggcatgggcatgcggcgcattcgctgtttgtcgtttcaacggcccaccaaggccacgatgcgtaggggttctgagaggaaggtacacaaaactggtaatgagacacggaccagactccgacgggaggaagaagtgaggaatattggtcaatgggaggaagcctgaaccagccaagtcgagtgagggatgacggcccgacgggttgtaaaccgcttttgccggggagtaacgcgatccacgtgaggggcgctgagagtacccgatgaataagc

SEQ ID NO: 9951 - DNA, 490 bp, unidentified
  misc_feature 1..490: note = Ascusbbf_1324346, encodes 16S rRNA
  source 1..490: mol_type = genomic DNA
agagtttgatcctggctcaggatgaacgctagcggcaggcttaacacatgcaagtcgaggggtaacgcggggtagcaatactctggcgacgaccggcgcacgggtgcgtaacgcgtatgcaacctacctgtaacaggggtataacggagagaaatttccactaatcccccatattgttagagattcgcatgtttctctaacgaaagcttcgttggttacggatgggcatgcgtgacattagagagtgggtaaggtaacggcttaccaaggcgacgatgtctaggggagctgagaggcttatgccacacacgggtactgagacacggaagagactcatacgggggggaacagtgaggaatagtggtaaagggacggaagtctgaaccagccatgccgcgtgaatgaagaaggccttcgggttgtaaagttcttttagtcatgaagatgatgacagtagtgacagaaaaagcaccggctaacttcgtgccag

SEQ ID NO: 9952 - DNA, 369 bp, unidentified
  misc_feature 1..369: note = Ascusbbf_1377393, encodes 16S rRNA
  source 1..369: mol_type = genomic DNA
agagtttgatcatggctcaggatgaacgctagcggcaggcttaacacatgcaagtcgaggggtaacgcggggtagcaatactctggcgacgaccggcgcacgggtgcgtaacgcgtatgcaacctacctgtaacaggggtataacggcgcgaaatttccactaatcccccatattgttattctttcggatgttaggataacgaaagcttcggtggttacggatgtgcatgcgtgacattagctgggtggtaagatagtcctttgggttggaaacgacttttgttggagagtaataagggctttgcgaagcccgatgagagtatcggacgaataagcatcggctaactccgtgccagcagccgcggtaat

SEQ ID NO: 9953 - DNA, 490 bp, unidentified
  misc_feature 1..490: note = Ascusbbf_1377398, encodes 16S rRNA
  source 1..490: mol_type = genomic DNA
agagtttgatcctggctcaggataaacgctggcggcgcacataagacatgcaagtcgaacgaacttattcgaaagtttacttttgcagcggttagtggcggactggtgagtaacgcgttagcaatctgcctatcagaggggagtcaacgtgagaaatcattgctaataccgcataagctctgagtatcgcatgatacaaatagatacggagcaatccgacgatagataagcttccgtctgatttgctagttggtgggttaacggcctaccaagacgatgttcagtagccggactgagaggtgaaaaggccacagttgggctgggatacggccccgaatcctacgaggggaaacagtcgggaaaattgcgcaatggaggaaactctgacgcagtgacgccgcgtgcaggaagaagggtttcggagtgtaaactgctttagagagggaagaaaaaaatgacggtacctatagaataagctccggctaactac

SEQ ID NO: 9954 - DNA, 490 bp, unidentified
  misc_feature 1..490: note = Ascusbbf_1324382, encodes 16S rRNA
  source 1..490: mol_type = genomic DNA
agagtttgatcctggctcaggatgaacgctagctacaggcttaacacatgcaagtcgcggggcatcatggcatgtagcaatacatgctgatggcgaccggcggatgggtgagtaacgcgtatccaacctggccctatctcgggtacagcccctcgaaagagggattaatccccgatgttccctgggatccgcatgttttccagggcaaaggcatttgtcggataggtatgggtatgcgttccattcgccagtgtgcggggtacgggccccccgagccgacgatggatagggggtctgagaggaaggcacaccaaactgggacggagacacggcccagactcctacgggaggcagcagtgaggaatagtggtcaatggcggtaacgctgaaccagccaagtagcgtgagggattacggccctatgggttgtaaacctcttttgtgagggagcaaccggtggcacgagtgccagtctgcgagtaccgttcga

SEQ ID NO: 9955 - DNA, 490 bp, unidentified
  misc_feature 1..490: note = Ascusbbf_1324388, encodes 16S rRNA
  source 1..490: mol_type = genomic DNA
agagtttgatcatggtcaggatcaacgctggcggcgtgcctaatgcatgcaagtcgaacggggtgtccttcgggtcacttccttggctgacgtgtgaggcacacatgggcaacctgccttatggagggggataaccgctggaaacagtgggtaataccgcataatcctggatctcgagtgggagatatagggaaagtcgcaagacgccgacagagtggcctgcgtccgattagctgtacggtgtggtaactgcctaccttggcagtgatcggtagctggtttgagaggattatcagccacacggggcctgagacacggccccgactcatacgggaggcagcagaaaggaattttccgcaatgggcgaaagcctgacggagcaacgccgcgtgtgggatgacgcttttcggagtgtaaaccactgttcgtggggacgaagcactgacggtacccacggaggaaggcccggctaactacgtgccagcagccg

SEQ ID NO: 9956 - DNA, 490 bp, unidentified
  misc_feature 1..490: note = Ascusbbf_1347224, encodes 16S rRNA
  source 1..490: mol_type = genomic DNA
agagtttgatcctggctcaggatgaacgctagcgacaggcctaacacatgcaagtcgaggggcagcgcgggagaagcttgcttttcctggcggcgaccggcgcacgggtgcgtaacaggtgtgcaatctgtccatagtcggggaatagcccagcgaaagttggattaatgctccatgtgtcacgaagccgcatgactttgtgatgaaacgtaaggactatgggtgagcacgcttctgattagatagttggtgaggtaacggctcaccaagtcgacgatcagtaggggttctgagaggaagggcccacacattggaaaggacacacgggacaaacacacacgggggaaacaaggtggagaaagggggaaagggggaggggcaaagaaccacaagggtgggtagagggataaggttataggggattaaaatctttttggcccgggggaaaaaacgggccagttgtgctttctgaaaatttaggaaaaataaa

SEQ ID NO: 9957 - DNA, 490 bp, unidentified
  misc_feature 1..490: note = Ascusbbf_1324294, encodes 16S rRNA
  source 1..490: mol_type = genomic DNA
agagtttgatcctggctcaggataaacgctggcggcgcacataagacatgcaagtcgaacggacttaactcattctttacgattcatagcgggtagtcgcggaatgggtagtaatgtagtagtaaccttcctatcagagaggaacaacagttggaaacgactgctaataccgcttattccacgcgaatcacatggttaaagagggaaaggagcaatccgcggatagatggattgataactgattggctagttgctggggtaacggcctccaaaggcgacgagaagtagccgtacgggggggttgagaggccaactagggtcctgcgtacggccgagactacgaagggaggaagaaggcgggaataatgagcaatggaagaagcgcggaggaagagacgccgcggggaggaagaaggttttcggattggaatatgctttagaaagggaagataaaagacagtacctgaagaataaggtccggctaactacg

SEQ ID NO: 9958 - DNA, 490 bp, unidentified
  misc_feature 1..490: note = Ascusbbf_1347249, encodes 16S rRNA
  source 1..490: mol_type = genomic DNA
agagtttgatcctggctcaggatgaacgctagctacaggcttaacacatgcaagtcgaggggcagcggggggatagcttgctttctttgccggcgaccggcgcacgggtgtgtaacgcgtatccaaccttccccatactcgggaatagccctgcgaaagtcagattaatgcccgatggtcttagtatatgacatcatgctttaagtaaagattcatcgctatgggatggcgatgcgtctgtttaggaagtgggcggggtaacggcccaccaagtcgtcgatcagtaggggttctgagaggaaggtcccccacattggaactgagaaacggtccaaactcctacgggaggcagcagtgaggaatattggtcaatggtcgagagactgaaccagccaagtagcgtgaaggatgactgcccgatgggttgtaaactgcttttaggcggggataaagtgccgcacgcgtagggtattgcaggtaccgcgtgaat

SEQ ID NO: 9959 - DNA, 490 bp, unidentified
  misc_feature 1..490: note = Ascusbbf_1444509, encodes 16S rRNA
  source 1..490: mol_type = genomic DNA
agagtttgatcctggctcaggacgaacgctagcgacaggcttaacacatgcaagtcgagcggcagcgcgggagaagcgtgctcttcctggcggcgcgcggcgcacgggcgcgctacaggggtgcaatctgtccatagtcggggaatagcccagcgaaagttggatgaatgctctatgcgtcactaagccgcctggctttgtgatgacacgtaaggactatgggtgagcacgcttctgactagacagttggtgaggtagaggctcaccaagtagacgatcagtaggggttctgagaggaaggtccccaacattggaactgagacacggtccaaaatcctacgggaggcagcagtgaggaatattggtcaatgggcgagagcctgaaccagccaagtagcgtgaaggatgaaggttctatggatgaaaaacttcttttgtccgaaagtaaaaaaggccacgtgtggcttcttgcaagtatcggacgaataag

SEQ ID NO: 9960 - DNA, 490 bp, unidentified
  misc_feature 1..490: note = Ascusbbf_1444618, encodes 16S rRNA
  source 1..490: mol_type = genomic DNA
agagtttgatcctggctcaggatgaacgctagctccaggcttaacacatgcaagtcgaggggcagcaggacaatagcttgctattgtcgctggcgaccggcgcacgggtgagtaacgcgtatccaaccttccccttattagggcatagcccggcgaaagtcggcttaataccctatgttattcgtctcggacctctgaagttaatcaaagatttatcgctacgggatggggatgcgtctgtttaggttgttggcgtgttaacggcccaccaagccatctatcagtagtggttctgagaggaaggtccccaacattggaactgagacacggtccaaactcctacgggaggcagcagtgaggaatattggtcaatgggcgagagcctgaaccagccaagtcgcgtgaaggatgaaggtcctatggattgtaaactgcttttgtccgagggtaaaaaaggccacgtgtggcttcttgcaagtatcggacgaat

SEQ ID NO: 9961 - DNA, 490 bp, unidentified
  misc_feature 1..490: note = Ascusbbf_1444602, encodes 16S rRNA
  source 1..490: mol_type = genomic DNA
agagtttgatcctggctcaggatgaacgctggcggcgtgcctaacacatgcaagtcgaacggaaaggattcttcggaattctttcattggcggccgggggagtaacgcgtgggtaacctgccccaaacagcggcacaacagctggaaacggcttctaataccgcataagcgcacagtgctgcatggtacagcgtgaaaagagtttatcggtatgggatggaccagggtcggattagacagatggggtggtaacggccctccaagccgacgaaaagtaggcgacctgggaggtggacgggcgacattgggactgagacacggaccaaacaccaacagggggcagcagtgggggatattgcacaacgagcgaaagcctgatgcagcgaccccgcgtgagtgaggaagtatttcggtaggtaaagctctagcagcagggaagaaaatgacggtacctgactaagaagccccggctaactacgtgccagcagcc

SEQ ID NO: 9962 - DNA, 490 bp, unidentified
  misc_feature 1..490: note = Ascusbbf_1324005, encodes 16S rRNA
  source 1..490: mol_type = genomic DNA
agagtttgatcctggctcaggatgaacgctggcggcgtgcctaatacatgcaagtcgaacgagggtgcttgcaccctagtggcgaacgggtgagtaacacgtaggtaacctgccctttagcttgggatacccagaggaaactttggctaataccggataacaacagaagaggcatctcttcagtttgaaaggccctttacggggtcacttaaggatgcacctgcggcgcattagctagttggtgagataccagcccaccaaggcgaggatgcgtagcctacctgagagggtgatcggccacattggaactgggacacggtccaaaagcctacgggaggcagacgtcaggaggttacggcaatgggggaaaccctgaccgggcaacgccgcgagagtgatgacggccctatgggttgtaaagctctgttgtaagggacgaatgattcgcttaggaaatgaagcgggtttgacggtaccttaccagaaagca

SEQ ID NO: 9963 - DNA, 490 bp, unidentified
  misc_feature 1..490: note = Ascusbbf_1378700, encodes 16S rRNA
  source 1..490: mol_type = genomic DNA
agagtttgatcctggctcaggatgaacgctagctacaggcttaacacatgcaagtcgaggggcagcataacgaaagcttgcttttgttgatggcgaccggcgcacgggtgagtaacgcttatccacccttccccttagtagggcatagcccggcgaacgtcggcttattcccctttgttttccgttgaggacatctgaagtggaacaaagatttatcgctacgggatggggctgcgtctgattaggttgttggcggggtaacggcccaccaagccatcgatcagtaggggttctgagaggaagtgcccacacattggtactgggaaacggaccaaacgccgacgggaggcagcagtgaggaatattgggcaatgggcgagagactgaaccagccaagtagcgtgaaggaggacggccctatgggttgtaaactgcttttgcaggggaataaagtgagggacgtgtgccggtttgtatgtaccatgagaat

SEQ ID NO: 9964 - DNA, 490 bp, unidentified
  misc_feature 1..490: note = Ascusbbf_1377496, encodes 16S rRNA
  source 1..490: mol_type = genomic DNA
agagtttgatcctggctcaggatgaatgctagctacaggcttaacacatgcaagtcgaggggcagcataacgaaagcttgctttcgttgatggcgaccggcgcacgggtgagtaacgcgtatccaaccttccccttagtagggcatagcccggcgaacgcctgattaataccctctgttttccgttgaggacatctgaagtggcacaaagatttatccctaagggatggagatgcgtctgagtaggttgtgggcggggtaacggcccaccacgccagcgatcagtaggcgttctgaggggaaggtacccgtcatgggaactgagaaccggacaaaacacctacgggaggcagtagggaggaatattggtccaggggcgagggcctgaaccagccaagtagcgtgcaggatgacggccctatgggttgtaaactgcttttgcatgggaataaagtgagggacgtgtcactttttgtatgtaccatgagaat

SEQ ID NO: 9965 - DNA, 490 bp, unidentified
  misc_feature 1..490: note = Ascusbbf_1445862, encodes 16S rRNA
  source 1..490: mol_type = genomic DNA
agagtttgatcctggctcaggacgaacgctggcggcgtgcttaacacatgcaagtcgaacggtaacgccccagcttgctggggtatacgagtggcgaacgggcgagtaacacgtgggtgacttgccccgcacctcgggataagcctgggaaactgggtctaataccggatagcactgtaccgtgagggtgtggtggaaagtttttcggtgtgggaggggcctgcggcctatcagcttgttggtggggtattggcctaccaaggcggcgccgggtagccggcctgagagggtggtcggccacatggggactgagacacggccgagactactgcgggaggcagcagtagggaagattgcacaatggggagaagccggatgcagcgacaccgcgtgggggatgacgaccttcgggttgtagactccttagaccgtcaacgaaggttttctgacggtagatggagaagaagcaccggctaactacgtgccagca

SEQ ID NO: 9966 - DNA, 490 bp, unidentified
  misc_feature 1..490: note = Ascusbbf_1347284, encodes 16S rRNA
  source 1..490: mol_type = genomic DNA
agcgtttgatcatggctcaggatgaacgctggcggcgtgcttaacacatgcaagtcgaacgaggtctaattacgtcagttttctgacggaagctcctgtactgagtggcggacgggtgtgtaacgcgtgggacacctgccctgctccgcggtataccagttggcaacgcctgttaataccgcataagcgcacagcaccgcattgtgcagtgtgtaaaactccggtgtaaccggatggtcccgcgtctgattgggccgttcgcagggttaccgccttccacaccgacgatcagtagccgtcctgggagagggaacgggcacagtgggactgagacacgacccaaacacctacgggaggcagcagtggggaatattgaacagtgggggaaaccctgatggcgcggcgccgcgtgagtgaagaagtatgtcggtatgaaaagctctagcagcagggaagaagatgacggtacctgcagaagcagcaccggcta

SEQ ID NO: 9967 - DNA, 490 bp, unidentified
  misc_feature 1..490: note = Ascusbbf_1377455, encodes 16S rRNA
  source 1..490: mol_type = genomic DNA
agagtttgatcatggctcaggatgaacgctggcggcgtgcctatcacatgcaagtcgaacggagttactttggtgaagttttcggacggatctgatttaacttagtggcgtacgggtgagtaatgcgtgagcaacctgcccttcagagggggacaacagttggaaacgactgctaataccgcataatgtatccgggagccatctcctggataccaaaggagaaatccgctgatggatgggcacacgtctgattagctagttggtgaggtaacggctcaccaaggctgcgatcagtagccggacttagaggttgacggaccacattggaactggaggacggcccagcgaccaacgggaggcagcagtggggaagattggccatgggcgaaagcctgacccagcaacgccgcgtgaaggaagaaggccttcgggttgtaaacttcttgtaagagggacgaagaagtgacggtacctcttgaataagcaacgg

SEQ ID NO: 9968 - DNA, 490 bp, unidentified
  misc_feature 1..490: note = Ascusbbf_1444576, encodes 16S rRNA
  source 1..490: mol_type = genomic DNA
agagtttgatcatggctcaggacgaacgctggcggcgtgcttaacacatgcaagtcgaacggtgaagtcggagcttcctctgccggatcagtggcgaacgggtgagtaacacgtgagtaacctgcccctgactctgggataaccattggaaacgatggctaatactggatacgagttgcctccgcatggagagtgcctggtaagatctatctgtctgggatggactcgcggcctttcggcttgttggtggggtaatggactaccaagacgacgacgggtagccggcctgatagtgcgaccgggcacactgggactgagacacggaccagactcctacgggaggcagcagaggggaatattgcacaatgggcgaaagccggatgcagcgacgcggcgtgagggatggcggccttcgggttgtaaaccactttcagcagggaagaagcgaaagtgacggtacctgaagaagaagcgccggctaactacgtgc

SEQ ID NO: 9969 - DNA, 490 bp, unidentified
  misc_feature 1..490: note = Ascusbbf_1324227, encodes 16S rRNA
  source 1..490: mol_type = genomic DNA
agagtttgatcatggctcaggataaacgctggcggcgcacataagacatgcaagtcgaacggacttaactcattcttaacgattgagagcggttagtggcggactagtgcgtactgtataagtaacctgcctatcagaggggaacaaccgttggaaacgactgctactaccgcctatgccacgagaatcacatggttcaagtgggcaaggagcaatcctctgatagttggacttatatctgattagctattttgtggggtaacggcctaccacgtcgacgataagtagccggactgagaggttacacggacaacttgggactgagatacggcccagactcctacgagaggcagcagtcgggaatattgcgcaatggaggaaactctgacgcagtgacgccgcgtgcaggaagaaggttttcggattgtaaactgctttagacagggaagaaaaaagacagtacctgtagaataagctccggctaactacg

SEQ ID NO: 9970 - DNA, 490 bp, unidentified
  misc_feature 1..490: note = Ascusbbf_1324240, encodes 16S rRNA
  source 1..490: mol_type = genomic DNA
agagtttgtcatggctcaggatgaacgctagctaccggctctacacctgcaagtcgagacgaaacgatattgaaagcttgcttttgttaggcgtcgaccggcgcacgggtgagtaactcttatcaaacatccctggaaatggggcataatccgtggacacgcggcctaatgtcctatgtgctccgaagaggacatctgatttggagtaaagattcctcgtttccggatggggatgcgtctgattagcttcctggcggggtaacggcccaccagggcgacaatcagtgggggttcggggaggtagagctcgcatatgagaacgatgagccagttcgagactctgagacgggcaggactcatgcaggagggagcaggagggagtatcgcaaactgcagagtaccgtgctgcagcaatgccgcatgggtgaagaagggcttcgaggtgtaaagaaattgcgccgcgggtggtgtaatgaagttaccgtaagaa

SEQ ID NO: 9971 - DNA, 490 bp, unidentified
  misc_feature 1..490: note = Ascusbbf_1445719, encodes 16S rRNA
  source 1..490: mol_type = genomic DNA
agagtttgatcctggctcaggatgaacgctagctacaggcctaacacatgcaagtcgaggggcagcataccgaaagctttcttttgtttatggcgaccggcgcacgggtgagtaacgcgtatccaaccttccccttagtatggcatatcccggcgaaagtcggattaataccctttgttttcctttgtggacatctgaattggaataaatatttatcgctcatggatggtgatgcgtctgattaggtttgtggcgggttaacggcccaccaagcgatcgatcagtaggggttctgagagttcggtcccccacattggtactgagacacgacacaaactcctacgggaggcagcagtggggaatattggtcaatggacgagagcctgaaccagccaagtagcgtgcaggatgacggccctatgggttgtaaactgctttcgcatgggaataaagtgagggacgtgtccctttttgtatgtaccatgagaat

SEQ ID NO: 9972 - DNA, 490 bp, unidentified
  misc_feature 1..490: note = Ascusbbf_1324253, encodes 16S rRNA
  source 1..490: mol_type = genomic DNA
agagtttgatcatggctcaggataaacgctggcggcgcacataagacatgcaagtcgaacggacttaatcaatagtttactattgatgcggttagtggcggactggtgagtaacacgtacgtcacccgcctatcagaggggaacaacagttagaaatgactgctaataccgcatatgccataactagcgcatgatcgaagtgggaaagtagcagtccactgatagatggacttgcgtctgattagatagttggtagggtaacggcctaccaagtcgacgatcagtagccggactgagagattaaacggcgaacttgggactgaggtacggcccagactcctaagggaggcagaagtcgggaatattgagcaatggaggaaacgctgacgcagtgacgccgcggggaggaagaaggttttcggattggaaactgctttagacagggaagaaacaagacagtacctgtagaataagctccggctaactacgt

SEQ ID NO: 9973 - DNA, 490 bp, unidentified
  misc_feature 1..490: note = Ascusbbf_1324248, encodes 16S rRNA
  source 1..490: mol_type = genomic DNA
agagtttgatcctggctcaggataaacgctggcggcgcacataagacatgcaagtcgaacgaacttaatcgaaagtttacttttgacgcggttagtggcggactggtgagtaacgcgtaagcaatctgcctatcagaggggaataacagtgagaaatcattgctaataccgcataagctgtgagtatcgcatgatacaaatagaaaaggagcaatccgctgatggatgagcttgcgtctgattagttagttggtggggtaacggcctaccaagacgatgatcagtagccggactgagaggttaaacgggccaattgggactgagataccgcccagaatcctaagggggggaggagtagggaatattgcggaaatgaggacacgctgacgcagtgacgccgcgtggaggaagaaggttttcggattgtaaacttctttagatagggaagaaaaaaatgacggtacctatagaataagctccggctaactac

SEQ ID NO: 9974 - DNA, 490 bp, unidentified
  misc_feature 1..490: note = Ascusbbf_1347338, encodes 16S rRNA
  source 1..490: mol_type = genomic DNA
agagtttgatcctggctcaggataaacgctggcggcgcacataagacatgcaagtcgaacggacttaactcattcttaacgattgagagcggttagtggcggaccggtgagtaatgtataagtaacctgcctatcagaggggaacaacagctggaaacgactgctaataccgcatatgtcacgagaatcacatggttcaagtgggaaaggagcaatccgctgatagatggacttatatctgattagatagttggtggggtaacggcctaccaaggcgacggtcagtagccggactgagaggttgagcgacgaacttgggactgagatacggccgaagtgcctacgggaggcagcagtcggaaatattgcgcaagggaggaaacgctgacgcagtgacgccgcgggcaggaagaaggttttcggattgtaaactgctttggacagggaagaaaaaagacagtacctgtagaataagctccggctaactacg

SEQ ID NO: 9975 - DNA, 490 bp, unidentified
  misc_feature 1..490: note = Ascusbbf_1346996, encodes 16S rRNA
  source 1..490: mol_type = genomic DNA
agagtttgatcctggctcaggataaacgctggcggcgcacataagacatgcaagtcgaacggacttaatcaatagtttactcttgattcggttagtggcggactggtgagtaacacgtaagtaacctgcctatcagagtggaacaacagttagaaatgactgctaataccgcatatgccatacctatcgcatgatagaagtgggacaggagcaatccactgttagatggacttgcgtctgattagatagttggtagggtaacggcctaccaagtcgacgatcagtagccggactgagaggttaaacggcaacattaggaccgagatacggcacagacgccgacgggaggcagcagtcgggaagattgcgcaagggaggaaactctgacgcagtgacgccgagtgcaggaagaaggttttcggattgtaaactgctttagacagggaagaaacaagacagtaccggtagaataagctccggctaactacgt

SEQ ID NO: 9976 - DNA, 486 bp, unidentified
  misc_feature 1..486: note = Ascusbbf_1323595, encodes 16S rRNA
  source 1..486: mol_type = genomic DNA
agagtttgatcctggctcagaacgaacgctagcggcaggccttaggcatgcaagtcgaacggacgccagagtggcttgcccttctgaagttagtggcgcacgagtgagtaacgcgcgggaaactgcccttccctggggcctaacgtctggatacggacgctagtaccgcatacgcccgcaaggcgaaggacttatcggtgatgggtgtgcccgcttgtgattagcttgttgggggggtaatggcctaccgaggcgctgctccctagctggtctgcgcggacgatcagccacgctggaactgagacacgggccagactcctacgggaggcagcagctaagaatattgggcaatggaggaaactctgacccagccatgccgcgtgaatgaagaaggccttcgggttgtaaagttcttttagtcatgaagatgatgacagtagtgacagaaaaagcaccggctaactgcgtgccagcagccgcggtaat

SEQ ID NO: 9977 - DNA, 486 bp, unidentified
  misc_feature 1..486: note = Ascusbbf_1377248, encodes 16S rRNA
  source 1..486: mol_type = genomic DNA
agagtttgatcctggctcagaacgaacgctggcggcaggtcttaggcatgcaagtcgaacggacgacagagtggcttgccattctgaagttagtggcgcacgagtgagtaacgcgtgggaaactgcccttcactggggaataacgtctggaaacggacgctaataccgcatacgcccgcaaggggaaagatttatcggtgatgggtgtccccgcgttggattagcttgtttgtcgggtaatggcctaccaaggcgatgatccatagctggtctgagaggacgatcagccaccctggaacggagacacggcccagactcatacgggggacagcaggtaagaatagtggaaaatgggggaaactctgacccagccatgccgcgtgaaagaagaaggcttgcggtgtgtaaagttcttttagtcatgaagaagatgacagtagcgacagaaaaagcaccggctaacttcgtgccagcagccgcggtaat

SEQ ID NO: 9978 - DNA, 490 bp, unidentified
  misc_feature 1..490: note = Ascusbbf_1323601, encodes 16S rRNA
  source 1..490: mol_type = genomic DNA
agagtttgatcctggctcaggataaacgctggcggcgcacataagacatgcaagtcgaacggacttaatcaatagtttactattgaagcggttagtggcggactggtgagtaacacgtaagtaacctgcctatcagaggggaacaacagttggaaatgactgctaataccgcatatgccataactatcgcatgatagaagtgggaaaggagcaatccactgatagatggacttgcgtctgattagatagttggtagggtaacggcctaccaagtcgacgatcagtagccggactgagaggttaagcggccaacttgggactgagatacggcacagactcctacgagtggcagaagtggggaatattgagcaatggaggaaactctgacgccgacacgccgagtggaggaagaaggttttcggattgtaaaatgctttagaaagggaagaaacaagacagtacctgtagaataaggaccggctaactacgt

SEQ ID NO: 9979 - DNA, 490 bp, unidentified
  misc_feature 1..490: note = Ascusbbf_1445798, encodes 16S rRNA
  source 1..490: mol_type = genomic DNA
agagtttgatcctggctcaggatgaacgctagctacaggcctaacacatgcaagtcgaggggcagcgggggcagagcttgctctgcctgccggcgaccggcgcatgggtgcgtaacgcgtatcgaacctcccccatactcgggaatagccttgcgaaagtaagattaatgcccgatggtctcagaatatgacatcatgctttgagtaaagattcatcggtatgggatggcgatgcgtctgattagatagttggcggggtaacggcccaccaagtcgtcgatcaggaggggttctgagaggacgggcgcgcacattggaactgagagacagaccaaaatcctacgagaggcaggagtcaggaatattggacaatgatcggaagactgaaccagccgagtagcgtgaaggatgcctgccctacgggttgtaaacttcttttatgcgggaatcaagtgccccacgcgtggagtattgcatgtaccgcgtgaat

SEQ ID NO: 9980 - DNA, 487 bp, unidentified
  misc_feature 1..487: note = Ascusbbf_1445792, encodes 16S rRNA
  source 1..487: mol_type = genomic DNA
agagtttggcagggagcagaacgaacgagggcggcaggcgtaacacaggcaagtggagcgggagggatggagagcgtgcgagtgagcatgagagaagcgcacgggggaggaacacgggggaacagacctttgggtgggggacaacagggggaaacgactgctaataccgcataagccctgagggggaaagattaattgccgagagattggcccgcggaagattaggtagtaggtggggtaacggcctacctagccgaggatctatagcggtgcggagaggacgatcagccacattggaactgagacacggtccagactcctacgggaggcagcagtgaggaatattgggcaatggagggaactctgacccagccatgccgcgtgagtgaagaaggttttcggattgtaaagctctttcagacgggaagatgatgacggtaccgtcagaagaagcaccggctaacttcgtgccagcagccgcggtaat

SEQ ID NO: 9981 - DNA, 486 bp, unidentified
  misc_feature 1..486: note = Ascusbbf_1324217, encodes 16S rRNA
  source 1..486: mol_type = genomic DNA
agagtttgatcatggctcagaacgaacgctggcggcaggtcttagtcaggaaaggagaaaggaagaaagtggggcggggaagggggaacggaggggggaaggagtgaggaaggagagggaaacgggaagggaagggggaagaagggggggaaagggaggagaagaacgcatacgccgggaaggggaaagagttatcggtgatggaggtgcccgcgttggattagcttgttggtgtggtaatggcctaccaaggcgatgatccatagctggtctgagaggacgatcagccacgctggaacggagacacggtcacgcctcctacgggaggcagcagctaagaatattgggcaatggaggaaactctgaaccagccatgccgcgtgaatgaagaaggccttcgggttgtaaagttcttttagtcatgaagatgatgacagtagtgacagaaaaagcaccggctaacttcgtgcccgcagccgcggtaat

SEQ ID NO: 9982 - DNA, 490 bp, unidentified
  misc_feature 1..490: note = Ascusbbf_1377422, encodes 16S rRNA
  source 1..490: mol_type = genomic DNA
agagtttgatcctggctcaggatgaacgctagcggcaggcttaacacatgcaagtcgaggggcagcgcggggtagcaatactctggcggcgaccggcggaagggtgcgtaacgcgtgagcaacttgcccgtcactgggggataggcactggaaacgttggttaatactcactaccatatggattcacatggttttatattgaaagattcgttggtgccgtatgggctcgcgtaacattcgctagtcggcggggtaacggcccaccgagggtaggatgtttaggggttctgagagtaaggtcccccccactgacactgagacacggtccagactcctacgggaggcagcagtgaggaatattggtcaatgggcggaagcctgaaccagccatgccgcgtgcaggaataaggccctatgggtcgtaaactgtttttccttgagggcaataagggtcacgagtggcccgatgagagtatcaggggaataagca

SEQ ID NO: 9983 - DNA, 490 bp, unidentified
  misc_feature 1..490: note = Ascusbbf_1347403, encodes 16S rRNA
  source 1..490: mol_type = genomic DNA
agagtttgatcatggctcaggacgaacgctagcggcgtgcctaacacatgcaagtcgaacggaacttatttagaagattctttcgggatgagtttacttacgtttgggtgcgtacgggtgagtaacgcgtgcgtaacctccctttgagcgggtaataacaatctgaaaatattgctaataccgcataacatatatttgtcgcgtggcaggtatattaaagatttcatcgctcaaagatgaactcgcgtccgattagttagttggggcggtaacggctacccaagaccgcgatcggtagccgaactgagaggttgaacggccacattgggactgagacacggcccagacgccgacgggaggcagcagtgggggatactgcgcaatgggggtaaccctgacgcagcaacgccgcgtgaaggatgaaggttttcggattggaaacttcttttattaaggacgaaaaatgacggtacttaatgaataagctccg

SEQ ID NO: 9984 - DNA, 490 bp, unidentified
  misc_feature 1..490: note = Ascusbbf_1445935, encodes 16S rRNA
  source 1..490: mol_type = genomic DNA
agagtttgatcctggctcaggatgaacgctagcggcaggcttaacacatgcaagtcgaggggcagcgcggggtagcaatactctgtcggcgaccgtcggaagggtgcgtaacgcgtgagcaactttcccttcactgggggataggcactggaaacgttgtgtaatactcccttacatatcgattcacatggattgatattgaaagattcgttgctgacggatgcgctcgcgtaacattagctagtcgtcgtggtaacggcccaccgaggctacgatgtgtaggggttttgataggaaggtcacaagcgatggaactaagagacggaccagactcctacgggaggaagcagtgaggaatattggtcaatgggcggaagcctgaaccaggcaggccgcgtgaaggaataaggccctatgggtcgtaaactgcttttccttgagggcaataagggtcacgtggggcccgatgagagtataaggggaataagca

SEQ ID NO: 9985 - DNA, 490 bp, unidentified
  misc_feature 1..490: note = Ascusbbf_1347211, encodes 16S rRNA
  source 1..490: mol_type = genomic DNA
agagtttgatcctggctcaggttaaacgctggcggcgcacataatacatgcaagtcgaacgaacttaatcgaaagtttacttttgatgcggttagtggcggactggtgagtaacgcgtaagcaatctgcctatcagaggggaataacagtgagaaatcatttctaataccgcataagctgtgagtatcgcatgatacaaatagataaggagcaatccgctgctagattagcttgcgtctgatgagatagttggtggggtaacggcctaccaagacgatgatcagtatccggattgagagggataaccggcacattgggaatggggtacgggcccgactcctacgggggggagcagtcaggaatattgcgaaatggaaggaactctgaagcaaggaagccgcgggcaggaagaaggttttcggattgtaaacggatttagagagggaagaaaaaaatgacggtgcctatagaagaagcaccggctaactac

SEQ ID NO: 9986 - DNA, 490 bp, unidentified
  misc_feature 1..490: note = Ascusbbf_1377411, encodes 16S rRNA
  source 1..490: mol_type = genomic DNA
agagtttgatcctggctcaggatgaacgctggcggcgtgcctaatacatgcaagtcgaacgagggtgcttgcaccctagtggcgaacgggtgagtaacacgtaggtaacctgcccttaagcttgggatacccagaggaaactttggctaataccggataacaacagaggaggcatctcttcagtttgaaaggccctttacggggtcacttaaggatggacctacggcgcattagctagttggtgagataacagcccaccaaggcggggatgcgtagccgacctgagagggtgatcggcccaactggaaccgggacacggtccaaaccccgacgggaggcagcaggaaggaggttgcggcaatgggggaaaccctgaccgagcaacgccgcgtgagtgatgacggccctatgggttgtaaaactctgttgtaagggacgaatgattcgcttaggaaatgaagcgggtttgacggtaccttaccagaaagcc

SEQ ID NO: 9987 - DNA, 490 bp, unidentified
  misc_feature 1..490: note = Ascusbbf_1347381, encodes 16S rRNA
  source 1..490: mol_type = genomic DNA
agagtttgatcatggctcaggacgaacgctggcggcgtgcttaacacatgcaagtcgagcggtaaggccctgcggggtacacgagcggcgaacgggcgagtaacacgtgagcaagctgccctccacttcgggataaccatcggaaacggtggctaatactggatatgaccttgccacgcaagtggtggggtggaaagttctggcggtggaggatgtgctcgcggccaatcagcttgttggtgaggtactggctcaccaaggcttcgacgggtagccggcctgagagggtgaccggccacactgggactgtgacacggcacagactcctacggaaggcagcagtgtggaatgttggacaatgggcgaaagcctgatccaggaacgccgcgtgaggggtgactgccttcgggttgtaaacctctttaagtaccgacgaagcgagagtgacggtaggtacagaagaagcaccggccaactacgtgccagcagc

SEQ ID NO: 9988 - DNA, 490 bp, unidentified
  misc_feature 1..490: note = Ascusbbf_1347313, encodes 16S rRNA
  source 1..490: mol_type = genomic DNA
agagtttgatcctggctcaggataaacgctggcggcgcacataagacatgcaagtcgaacggacttaactcattattaacgattgagtgcggttagtggcggactggtgagtaatgtataagtaacctgcctatcagaggggaacaacagttggaaacgactgctaataccgcatatgccacgagaatcacatgggtcaagtgggaacggagcagtccgctgataaatggacttatatctgattagctagtgggtggggtaacggcctaccaaggcgacgatcagtagccggactgagtggtgaaaaggccacattgggattgggaaacggcccagactctaacggaaggaagcagagggaaaaatggcgaaatggaggaaactctaacgaagtgaggcggcgggcaggaagaaggtttccggattgtaaactgctttagacagggaagaaaaaagacagtacctgtagaagaagcaccggctaactacg

SEQ ID NO: 9989 - DNA, 490 bp, unidentified
  misc_feature 1..490: note = Ascusbbf_1324163, encodes 16S rRNA
  source 1..490: mol_type = genomic DNA
agagtttgatcctggctcaggatgaacgctagctacaggcttaacacatgcaagtcgaggggcagcataacgaaagcttgcttttgttgatggcgaccggcgcacgggtgagtaacgcgtatctaaccttccccttagtagggcatagcccggcgaaagtcgtattaataccctatgttttccgttgaggatatctgaagtggaacaaagatttatcgctaagggatggggatgcgtctgattaggttgttggcggggtaacggcccaccaagccatcgatcagtaggggttctgagagggagggcaccaacagtggtactaggacacggaccaaactcctacgggaggcagcggtgcggaatagtggtcaatgggcgagagccagaaccagccaagtagcgtgaaggatgacggccctatgggttgtaaactgcttttgcatgggaataaagtgagggaggtgtccagttgtgtatgtaccatgagaat

SEQ ID NO: 9990 - DNA, 486 bp, unidentified
  misc_feature 1..486: note = Ascusbbf_1377590, encodes 16S rRNA
  source 1..486: mol_type = genomic DNA
agagtttgatcatggctcagaacgaacgctggcggcaggtcttaggaaggaaaggagaaaggaagaaagtgtggcttgaaagggggaacggaggggcggagcactgaggaaagagggggaaagggggagggaagggggaagaagggctgtaaagggaagagaagaacgcatacgccgggaaggggaaagattgttcggtgatggatgtgcccgcgttggattagcttgttggtggggtaatggcctaccaaggcgatgatccatagctggtctgagaggacgatcagccacgctggaactgagacacggtacctcctcctacgggaggcagcagctaagaatattgggcaatggaggaaactctgacccagccatgccgcgtgaatgaagaaggccttcgggttgtaaagttcttttagtcatgaagatgatgaccgtagtgacagaaaaagcaccggctaacttcgtgcccgcagccgcggtaat

SEQ ID NO: 9991 - DNA, 490 bp, unidentified
  misc_feature 1..490: note = Ascusbbf_1377604, encodes 16S rRNA
  source 1..490: mol_type = genomic DNA
agagtttgatcctggctcaggataaacgctagctgcgcgcttaacacatgcaagtcgaaggaccttaatcggatgtctaccttactttggcttcgacccgcacacgtgtgagtcacgcgtgtcctcccttcctctgagtggaacataaccgagcaatcatcggaataataccctatgttctgcgtctcgcacatctgaagtagagcagaagctattcgctgatagatgagcatgcgtctgattagttagtgggcggggtaacggcccacctagccgacgatcagtagccggactgagaggttaaacggcaacattgggactgggatacggcccagactcctacgggaggcagcagtcgggaatattgcgcaatggaggaaactctgacgcagtgacgccgcgtgcaggaagaaggttttcggattgtaaactgctttagatagggaagaaaaaaatgacggtacctatagaataagctccggctaactac

SEQ ID NO: 9992 - DNA, 490 bp, unidentified
  misc_feature 1..490: note = Ascusbbf_1445886, encodes 16S rRNA
  source 1..490: mol_type = genomic DNA
agagtttgatcctggctcaggatgaacgctagcgataggcctaacacatgcaagtcgaggggcagcacatgaagtagcaattcttattgtcgcgaccggcgcacgggtgagtaacgcgtctgcaacctgcctccaacacgggaataacccgttgaaagacggactaataccccataacacagggatcccgcatgggaatatttgttaaagattaatcggttgtagatgtgcgtgcgttccattagcttgttggtgcggtaacgactcaccacggccacgatggataggggaactgagaggtaggtcaccaacagtgggactggaaaccggaccagaatccgccgggaggaagcagtgaggaagattggtcaatggagggaaggctgaaccagccacgtagcgtgaaggaagacggccctacgggttgtaaacttcttttgtaagagaataaagtggaggacgggtactattttgcatgtaccttacgaat

SEQ ID NO: 9993 - DNA, 486 bp, unidentified
  misc_feature 1..486: note = Ascusbbf_1377589, encodes 16S rRNA
  source 1..486: mol_type = genomic DNA
agagtttgatcctggctcagaacgaacgctggcggcatgtcttaggcatgcaagtcgaacggacgtcagagttccttgccattctaatgtcagtggcgcacgtgagggttacgcgtgctaccctcccctttactggggaataccgtctggaaacggacgctaataccccatacgcccgcctggtgcgagatttatcggtgatggctgtgctgacgttggtttagcctgttggtggggcagaggcctaccaaggcgttggtccatagctggtctgcgaagacgaccagccacgctagaagtgggagacgggccagagtcctacgggagggagcagggatgaagatggaacaacggaggaaacacggagccagtcagaacgcgaaaatgaagagggcctgcggatcgtaaagttcttttagacaggaagaggatgacagtagggacagaagaagcaccggctaactacgtgccagcagccgcggtaat

SEQ ID NO: 9994 - DNA, 490 bp, unidentified
  misc_feature 1..490: note = Ascusbbf_1480771, encodes 16S rRNA
  source 1..490: mol_type = genomic DNA
agagttgatcctggctcagaacgaacgctggcggcaggcctaacacatgcaagtcgagcgcaccttcgggtgagcggcggacgggtgagtatcgcgtgggaacgtgcccttctctacggaatagtcctgggaaactgggggtaataccgtatacgcccttttggggaaagatttatcagagaaggatcggcccgcgttggattaggtagttggtggggtaatggctcaccaagccgacgatccatagctggtttgagaggatgatcagccacactgggactgagacacggcccagactcctacgggaggcagcagtggggaatattggacaatgggcgcaagcctgatccagccacgccgcgtgagtgatgaaggccttcgggtcgtaaagctctgtggggagggacgaaccgctgcaggttaatagtctgcagcatgacggtacctccttagcaagcaccggctaacttcgtgccagcagccgcggtaa

SEQ ID NO: 9995 - DNA, 490 bp, unidentified
  misc_feature 1..490: note = Ascusbbf_834301, encodes 16S rRNA
  source 1..490: mol_type = genomic DNA
agagtttgatcctggctcaggacgaacgctggcggcgtgcttaacacatgcaagtcgagcggtaaggcctccttcggggggtacacgagcggcgaacgggtgagtaacacgtgagtaatctgcccttcactctgggataagcaccggaaacggtgtctaataccggatacgaccaactgtcgcatggtgtgttggtggaaagttttttcggtgggggatgtgctcgcggcctatcagcttgatggtggggtaatggcctaccatggcgtcgacgggtagccggcctgagagggtgaccggtcacactgggactgagacacggcccagactcctacgggaggcagcagtggggaatattggacaatgggcggaagcctgatccagcaacgccgcgtgagggatgacggccttcgggttgtaaacctctttcatcaccgacgaagtccttgcttttggggtgggggtgacggtaggtggagaagaagcaccg

SEQ ID NO: 9996 - DNA, 477 bp, unidentified
  misc_feature 1..477: note = Ascusbbf_1430337, encodes 16S rRNA
  source 1..477: mol_type = genomic DNA
agagtttgatcctggctcagaacgaacgctggcggcaggcttaacacatgcaagtcgaacgggcgtagcaatacgtcagtggcagacgggtgagtaacgcgtgggaatctacccagtggtttggaataactcagggaaacttgagctaataccggatacgcccttcgggggaaagatttatcgccattggaagagcccgcgtcggattagctagttggtggggtaatggcccaccaaggcgacgatccgtagccgacctgagagggtgatcggccacattggaactgagacacggtccaaactcctacgggaggcagcagtaaggagttttcggcaatgggggaaaccctgaccgagcaacgccgcgtgagggatgacggccttcgggttgtaaacctcttttagcagggaagaagcgagagtgacggtacctgcagaaaaagcgccggctaactacgtgccagcagccgcggtaat

SEQ ID NO: 9997 - DNA, 482 bp, unidentified
  misc_feature 1..482: note = Ascusbbf_1606103, encodes 16S rRNA
  source 1..482: mol_type = genomic DNA
agagtttgatcctggctcaggacgaacgctggcggcgtgcctaatacatgcaagtcgagcggtaaggccccttcgggggtacacgagcggcggacggctgagtagcgcgtaggaacgtaccccaaagtgagggataagcaccagaaatggtgtctaataccgcatgtgatccacggattaaagccttgtgcgctttgggagcggcctgcgtatgattagcttgttggtgaggtaaaagctcaccaaggcgacgatcattagctggtctgagaggatgatcagccagactgggactgagacacggcccagactcctacggggggcagcagtagggaattttgcgcaatgggcgaaagcctgacgcagcaacgccgcgtgatcgtagacgcccttcggggtgtaaagatctgtcagtagggacgaacaatgactgtacctacagaggaagcaccggctaactccgtgccagcagccgcggtaat

SEQ ID NO: 9998 - DNA, 490 bp, unidentified
  misc_feature 1..490: note = Ascusbbf_1421555, encodes 16S rRNA
  source 1..490: mol_type = genomic DNA
agagtttgatcctggctcaggatgaacgctggcggcgcgcctaacacatgcaagtcgaacgattaaagcaccttcgggtgtgtataaagtggcgaacggctgagtaacacgtgggcaacctacccttcactctgggatagccacgggaaaccgtgggtaataccggatactccgtgcacaccgcatgatgagcacgggaaagcgcatacggtgaaggatgggcccgcggcctgttagcttgttggtggggtaacggcctaccaaggcaattatgggtagctgggttgagagaccgaccagccagattgggactgagacacggcccagactcctacgggaggcagcagtggggaatcttgcgcaatgggcgaaagcctgacgcagcgacgccgcgtgcgggatgaaggccttcgggttgtaaagcactttcagagggaaggaacaaatgacgttaccctcagaagaagcaccggctaactccgtgccagca

SEQ ID NO: 9999 - DNA, 154 bp, unidentified
  misc_feature 1..154: note = Ascusbbf_1329020, encodes 16S rRNA
  source 1..154: mol_type = genomic DNA
agagtttgatcctggctcagggcatcacaacgatagccggcagcatcagcgatgaagaccaacaagtgcccattcatgtggaggctcaggagaaatccgaggaggagatagccaatcagattatcttcagcgaccctgccagcagccgcgtaat

SEQ ID NO: 10000 - DNA, 357 bp, unidentified
  misc_feature 1..357: note = Ascusbbf_897990, encodes 16S rRNA
  source 1..357: mol_type = genomic DNA
agagtttgatcctggctcaggacgaacgctggcggcgtgcctaatacatgcaagtcgtacgcttctatttccaccggagcttgctccatcggaaaaagaagagtggcgaacgggtgagtaacacgtgggtaacctgcccatcagaaggggataacacttggaacctacgggaggcagcagtagggaatcttcggcaatggacgaaagtctgaccgagcaacgccgcgtgagtgaagaaggttttcggatcgtaaaactctgttgttagagaagaacaaggatgagagtaactgttcatcccttgacggtatctaaccagaaagccacggctaactacgtgccagcagccgcggtaat

SEQ ID NO: 10001 - DNA, 490 bp, unidentified
  misc_feature 1..490: note = Ascusbbf_912071, encodes 16S rRNA
  source 1..490: mol_type = genomic DNA
agagtttgatcatggctcaggatgaacgctggcggcgtgcttaacacatgcaagtcgaacggacaaagaagatttcggttttctttgttagtggcgaacgggtgagtaacgcgtgagtaacctgccctggagtgggggacaacagttggaaacgactgctaataccgcataagcccacagtgccgcatggcacagcgggaaaaggatttattcgcttcaggatggactcgcgtccaattagctagttggtgaggtaacggcccaccaaggcgacgattggtagccggactgagaggttgaacggccacattgggactgagacacggcccagactcctacgggaggcagcagtgggggatgttgcacaatgggggaaaccctgatgcagcgacgccgcgtggaggaagaaggttttcggattgtaaactcctgtcgttagggacgaatcatgacggtacctaacaagaaagcaccggctaactacgtgcca

SEQ ID NO: 10002 - DNA, 186 bp, unidentified
  misc_feature 1..186: note = Ascusbbf_953250, encodes 16S rRNA
  source 1..186: mol_type = genomic DNA
agagtttgatcctggctcagacacccttcgtcaaccagcagacaggtcgcttcgacgtagcacagctcacgaagttcctcaacgattacaagtcaaaccagaacccgcagctggccgagcagtacaaggccatctacgactactggcgcttcatcgagaagaccctgcgccagcagccgcggtaat

SEQ ID NO: 10003 - DNA, 166 bp, unidentified
  misc_feature 1..166: note = Ascusbbf_1546535, encodes 16S rRNA
  source 1..166: mol_type = genomic DNA
agagtttgatcctggctcaggacttccgcatcaagggcagtcacgactatgtatatggtctgcctgagattaataaggaagagattatgaaagctcagcatttggctaatccaggctgtttcgccacttgtattcaggtagcgttgctgccagcagccgcggtaat

SEQ ID NO: 10004 - DNA, 170 bp, unidentified
  misc_feature 1..170: note = Ascusbbf_953261, encodes 16S rRNA
  source 1..170: mol_type = genomic DNA
agagtttgatcctggctcagtatcgttggaagagggattggtgctgaccgaccacattgctggtgcgctcctctctcatggaccgaaacgtatgaactatatcctgatggctctctgccagcggggtgaggcacgctatgcgattgacacccgccagcagccgcggtaat

SEQ ID NO: 10005 - DNA, 343 bp, unidentified
  misc_feature 1..343: note = Ascusbbf_870932, encodes 16S rRNA
  source 1..343: mol_type = genomic DNA
agagtttgatcatggctcagaccggtactctgggcaccaattcccagacgggcaccgttcatcagggacatcacgtacttaatcaggcccagacgggtgctgccgcacagctcggcacgcgcgttcttataggtaagctcgcaggtcgggctgccgtggataccgagtttgtgctcgatgtgacggacattcacgccaccctggcgcttgtcatagataaacatggaaaggccgcggccatcgcgggtaccttcctcactgcgggccaggaccaggtggatatcggagtcaccgttggtgatgaaacgcttcacaccgttcagcagccagcagccgcggtaat

SEQ ID NO: 10006 - DNA, 490 bp, unidentified
  misc_feature 1..490: note = Ascusbbf_783437, encodes 16S rRNA
  source 1..490: mol_type = genomic DNA
agagtttgatcatggctcaggatgaacgctagcggcaggcctaatacatgcaagtcgaacggtaaatgtcccttcggggatatgagagtggcgcacgggtgcgtaacgcgtatgcaacccacccgctgtcgggggatagcccgtagaaatgcgaattaataccccatgaggagaaagggcggcatcgtacttttttcaaaactttggtgacggcggacgggcatgcgtggcattagatagttggcggggtaacggcccaccaagtcgacgatggctaggggatctgagaggacggtcccccacactggtactgagacacggaccagactcctacgggaggcagcagtaagggatattggtcaatggggggaaccctggaccagccatgccgcgtgaaggaagacggtcctctggattgtaaacttctgttgttagggaagaacggtaagtataggaaatgatacttaagtgacggtacctttcaagaaag

SEQ ID NO: 10007 - DNA, 488 bp, unidentified
  misc_feature 1..488: note = Ascusbbf_1646256, encodes 16S rRNA
  source 1..488: mol_type = genomic DNA
agagtttgatcctggctcagaacgaacgctggcggcaggcttaacacatgcaagttgaacgggatttatttagtacttgtactggatgatgagagtggcgcacgggtgagtaatatgtaggaacatacctattggtcgggaataacggttggaaacgacaggtaataccggataagccctgagggggaaagatttatcgccgatagaatggcctgcatcagattaggcagttggtggggtaaaggcctaccaaaccgacgatctgtagctggtctgagaggacgatcagccacattgggactgagacacggcccagactcctacgggaggcagcagtgaggaatattgggcaatgggggcaaccctgacccagccatgccgcgtgagtgaagaaggttttcggattgtaaagctctttcggatgtgacgatgatgacggtagcatctaaagaagccccggcaaacttcgtgccagcagccgcggtaat

SEQ ID NO: 10008 - DNA, 490 bp, unidentified
  misc_feature 1..490: note = Ascusbbf_1365736, encodes 16S rRNA
  source 1..490: mol_type = genomic DNA
agagtttgatcctggctcaggatgaacgctggcggcgtgcttaacacatgcaagtcgagcgagaaatcgggaaatgaaacttcggtagatttgaacgatggaaagcggcggacgggtgagtaacacgtgggaaacctgccttttgcagagggacagccgagggaaacttcgattaatacctcataacgcatcatcgtcgcatggcggagatgccaaagatttatcggcaagagatggtcccgcgtctgattagctggttggtgaggtagcggctcaccaaggcgacgatcagtagccggcctgagaggataaacaatcacattaaaactaaaacacaatccaaactcctacaaaaaacaacaataaaaaatattacacaataaacacaaacctaatacagcaacgccgcgtgaaggatgaaggccttcgggtcgtaaacttctgtccaaagggaagaacaaatgacggtacctttggaggaagccccggc

SEQ ID NO: 10009 - DNA, 490 bp, unidentified
  misc_feature 1..490: note = Ascusbbf_1245359, encodes 16S rRNA
  source 1..490: mol_type = genomic DNA
agagtttgatcatggctcaggatgaacgctggctacaggcttaacacatgcaagtcgaggggcatcgcatggggttgctcgcaactcctggcggcgaccggcgcacgggtgagtaacgcgtatccaacctgccccgtggtagggtatagcccggtgaaaaccggattaatcccctatgcggtcacgagacggcatccgaccgtgaccaaaggacttccgccatgggatggggatgcgtctgattaggtagtagacggggcaacggcccacctagccgtcgatcagtaggggttctgagaggaaggtcccccacattggaactgagacacggtccaaactcctacgggaggcagcagtgaggaatattggtcaatgggcgatggcctgaaccagccaagtagcgtgagggacgacggccctacgggttgtagacctcttatatgcggggataaagtcactcacgcgtgggtgtttgcaggtaccgcatgaa

SEQ ID NO: 10010 - DNA, 490 bp, unidentified
  misc_feature 1..490: note = Ascusbbf_1409279, encodes 16S rRNA
  source 1..490: mol_type = genomic DNA
agagtttgatcatggctcagaacgaacgctggcggcaggcttaacacatgcaagtcgaacgatctcttcggagatagtggcagacgggtgagtaacacgtgggaatctacctggttcttcgggataactgatggaaacgtcagctaataccggatacgcccttttggggaaagatttatcggaatcagatgagcccgcgtaagattagctagttggtggggtaacggctcaccaaggcgacgatctttagctggtctgagaggatgatcagccacactgggactgagacacggcccagactcctacgggaggcagcagttagggatattcgtcaatgggggaaaccctgaacgagcaatgccgcgtgagtgatgacggtcttatagattgtaaaactctgttgtaaaggaagaaaccttattataggtaatgataataagttgactgtactttaccagaaagccccggctaactacgtgccagcagccgc

SEQ ID NO: 10011 - DNA, 151 bp, unidentified
  misc_feature 1..151: note = Ascusbbf_1652934, encodes 16S rRNA
  source 1..151: mol_type = genomic DNA
agagtttgatcatggctcagcctggctggatatcatccagtccatcagcctggcgttttcgagccgggcggctgccctcggcatgatcatcatgctcatcggcggcttttcgatgtatatggataagatcggtgccagcagccgcggtaat

SEQ ID NO: 10012 - DNA, 155 bp, unidentified
  misc_feature 1..155: note = Ascusbbf_1643892, encodes 16S rRNA
  source 1..155: mol_type = genomic DNA
agagtttgatcctggctcagcaggatttcgctctgcagccgcggggccagtgtatccaccagctcccggcaaatctcaggccgccgctccgccggcacatcctgccagcgcccagcgtactggtcacgtacctgctcgccagcagccgcggtaat

SEQ ID NO: 10013 - DNA, 490 bp, unidentified
  misc_feature 1..490: note = Ascusbbf_1608754, encodes 16S rRNA
  source 1..490: mol_type = genomic DNA
agagtttgatcctggctcaggatgaacgctagctacaggcttaacacatgcaagtcgaacgaagcttgagaacagaattcttcggaaggacgtttgatatgactgagtggcggacgggtgagtaacgcgtgagcaacctgcccttcggagggggatagtgtctggaaacggacagtaataccgcataatgttggatgatggcatcttcattcaaccaaagatttatcgccgaaggatgggctcgcgtctgattagatagttggtggggtaacggcctaccaagtcgacgatcagtagccggactgagaggttgaacggccacattgggactgagacacggcccagactcctacgggaggcagcagtggggaatattgcacaatgggcgcaagcctgatgcagcaacgccgcgtggaggaagacggttttcggattgtaaactgctttagatagggaagaaaaaaaatgacggtacctatagaataagctc

SEQ ID NO: 10014 - DNA, 490 bp, unidentified
  misc_feature 1..490: note = Ascusbbf_1679199, encodes 16S rRNA
  source 1..490: mol_type = genomic DNA
agagtttgatcctggctcaggacgaacgctggcggcgtgcctaacacatgcaagtcgaacgaagcactggaaatgattccttcgggttgattttcctttaactgagtggcggacgggtgagtaacacgtgagcaacctgcctttcagagcgggatagcagttggaaacaactgataataccgcatgacatgttttctccacatgaggaaaacatcaaataatttttcgctgaaagatgggctcgcgtccgattaaataattggtgagacaacggctcaccaagccgacgatcggtagccggactgagaggtcgatcggccacattaaaactaaaacacggcccagactcctacgggagacagcaatgaaaaatattgcacaataaacgcaaacctaatgcagcaacgccgcgtgagggaggacggtcttcggattgtaaacctctgtccttggggaagaaacaaatgacggtacccttggaggaagccac

SEQ ID NO: 10015 - DNA, 490 bp, unidentified
  misc_feature 1..490: note = Ascusbbf_1378008, encodes 16S rRNA
  source 1..490: mol_type = genomic DNA
agagtttgatcctggctcaggacgaacgctggcggcgtgcttaacacatgcaagtcgaacggtaaggccccttcgggggtacacgagtggcgaacgggtgagtaacacgtgggtaatctgccctgcacttcgggataagcctgggaaactgggtctaataccggatatgaactccttccgcatggtgggggttggaaagtttttcggtgcaggatgagcccgcggcctatcagcttgttggtggggtaatggcctaccaaggcgacgacggatagccggcctgagagggtgatcggccacacgggaattgggaaacggcccagatcgcgacggggggaagcagtggggaatattgctcaatgggcgaaagcctgttgcggcgacgccgcgtggggatgacggtcttcggattgtaaacccctttcagtagggacgaagcgcaagtgacggtacctgcagaagaagcaccggctaactacgtgccagcagc

SEQ ID NO: 10016 - DNA, 490 bp, unidentified
  misc_feature 1..490: note = Ascusbbf_1435806, encodes 16S rRNA
  source 1..490: mol_type = genomic DNA
agagtttgatcctggctcaggataaacgctggcggcgcacataagacatgcaagtcgaacgaacttaatcgaaagtttacttttgacgcggttagtggcggactggtgagtaacgcgtaagcactctgcctatcagaggggaataacagtgagaaatcattgctaataccgcataagctgtgagtatcgcatgatacaaacagaaaaggagcaatccgctgatagaggggcttgcgtctgattagttagttggtggggtaacggcctaccaaggcgatgatcagtagccggactgagtggttaagagggcacagtgggaatgagatacggcccagacacctaggggaagcggcgatcgggaggaaggcggaatggaggaaactctgacgtagtgacaccgcgtgcaggaagaaagttttcgggttgtaaacggcattagagagggaagaaaaaaaatgacggtacctaaagaataagcaccggctaacta

SEQ ID NO: 10017 - DNA, 486 bp, unidentified
  misc_feature 1..486: note = Ascusbbf_1321601, encodes 16S rRNA
  source 1..486: mol_type = genomic DNA
agagtttgatcatggctcagaacgaacgctggcggcaggtcttaggcatgcaagtcgaacggacgacagagtggcttgccattctgaagttagtggcgcacgagtgagtcacgcgtgggaaactgcccttcactggggaataacgtctggatacggacgctaataccgcatacgcccgccaggggaaagatttatcggttatggttgtgcccgggtcggattagcttgttggtggggtaatggcctaccaaggcgatgagccatagctggtctgagaggacgatcagccacgcgggaactgagacacgggccagactcctacggggggcagcagctaagaatattgggcaatggaggaaactctgacccagccatgccgcgtgaatgaagaaggcctgcggggtgtaaagttcttttagtcatgaagatgatgacagtagtgacagaaaaagcaccggctaactgcgtgccagcagccgcggtaat

SEQ ID NO: 10018 - DNA, 490 bp, unidentified
  misc_feature 1..490: note = Ascusbbf_1321923, encodes 16S rRNA
  source 1..490: mol_type = genomic DNA
agagtttgatcatggctcaggacgaacgctggcggcatgcttaacacatgcaagtcgaacggactgattccttcgggttgaaagttagtggcgaacgggtgagtaatgtatgagcaacctgcctctatcaacgggataacagttggaaacgactgttaatacggtataagactacggcaccgcatgatgttgcggtaaaagatttttcggatagagatgggctcatatcccattggctagttggtgagataacagccaaccaaggcgacgatgggtagccgagctgagaggctgatcggcgacaatgggactgagacacgacccagacgcctacgggaggcagcagtggggaatattgggcaatgtaggcaactctgacccagcaatgccgcgtgagtgatgaaggtaattttattgtaaagctcttttctcaggaacgaataaagatgacggtacctgaggaataagccccggctaactacgtgccagc

SEQ ID NO: 10019 - DNA, 486 bp, unidentified
  misc_feature 1..486: note = Ascusbbf_1372186, encodes 16S rRNA
  source 1..486: mol_type = genomic DNA
agagtttgatcatggctcagaacgaacgctggcggcaggtcttacacatgcaagtcgaacggacaacggagtagcttgccattctgactttcgtgtcgcgcgcgtgagtaacgcgtgggaaactccccttcactggggaatatcgtgtggcaacggaccctaataccgcacacgcccccaaggggaaagagttatcggtggtgggtgtgcccgcgaccgattagcttgttgtgggagtagtggcctaccaaggcgatgatccatagctgggctgagaggacgatcggccacgctggaacggggacaaggagcagagtcctacgggaggtagcagaaaagaagattgggcaatggagggaactcggagcaagccatgccgcgggaatgaagaaggccattggggggtaaaggtatgttagtcatgaagatgatgaaagtagggacagaaaaagcaccggccaacctcgtgccagcaggcggggtaaa

SEQ ID NO: 10020 - DNA, 490 bp, unidentified
  misc_feature 1..490: note = Ascusbbf_1321625, encodes 16S rRNA
  source 1..490: mol_type = genomic DNA
agagtttgatcctggctcaggatgaacgctagcggcaggcttaacacatgcaagtcgaggggtaacgcggggtagcaagactctggcgacgaccggcgcacgggggcgtaacgcgtatgcaaccgacctgtaacagggggagaacggagagaaaggtccactaatcccccatatggttagagattcgcaggtgtctcgaacgaaagcttcggtggtgacggatgagcatgcgggacattagctagttggtaaggtaacggcgtaccaaggcgacgatgtctaggggcgctgagaggcttagccccccccccgttcctgcgcccccgcccagcctcctccgcgaggcagcagtgtcgactattggtccatggacggaagtctgaaccagccatgccgcgtggaggcagacggtcctatgggttgtaacctccttttgttcgagagtaatacgaggcttgcgcgcctcgatgagcgtatcggacgaataagc

SEQ ID NO: 10021 - DNA, 490 bp, unidentified
  misc_feature 1..490: note = Ascusbbf_1372198, encodes 16S rRNA
  source 1..490: mol_type = genomic DNA
agagtttgatcctggctcaggatgaacgctagcggcaggcttaacacatgcaagtcgaggggtaacgcggggtagcactactctggcgacgaccggcgcacgggtgcgtaacgcgtatgcaacctacctgtaacaggggtataacggagagaaatttccactaatcccccatattgttagagattcgcatgtttctctatcgaaagcttcggtggttacggatgggcatgcttgacattagctagttggtaaggtaacgacttaccaagtcgacgatttctaggggagctgagagacttatccccctgactgggacagagacacggcccagactcctgaggcaggaggcagtgaggaatagtggtcaatggaaggaagtctgaaccagccaggccgcgtggaggaagaaggtgctatgggttgtaaactccttttgttcgagagtaataagaggcttgcgagcctcgatgagagtatcggacgaataagc

SEQ ID NO: 10022 - DNA, 486 bp, unidentified
  misc_feature 1..486: note = Ascusbbf_1372179, encodes 16S rRNA
  source 1..486: mol_type = genomic DNA
agagtttgatcctggctcagaacgaacgctggcggcaggtcttaggcatgcaagtcgaacggacgacagagtggctcgccattctgaagttagtcgcgcacgcttgtgtaacgcgcgggaaactgctcttcactggtggataatgaccggaaacggaccctcataccgcatccacccgcacggggaaacatttctcggtggtggatgtgcttgctatggattagctcgtcggtggggtaatggcctaccaaggcgatgatccatacctggtctgagaggacgatcagccacgctggaactgagacacggtccagactgctacggggggcagcagctaagaatattgggcaagggaggagactccgagccagccatgcagcgggaatgaagaaggccttcgggtgggaaagttcttttagtcatgaagatgatgacagtagtgacagaaaaagcaccggctaactccgtgccagcagccgcggtaat

SEQ ID NO: 10023 - DNA, 490 bp, unidentified
  misc_feature 1..490: note = Ascusbbf_1321932, encodes 16S rRNA
  source 1..490: mol_type = genomic DNA
agagtttgatcctggctcaggatcaacgctggcggcgtgcctaatgcatgcaagtcgaacggggtggccttcgggtctcttacgtggcggacgggtgaggcacacgtgggcaacctgcctgttggagggggctaaccgctgggaacagccggtaataccgcataatcctggatctcgtgtgggagatctggggtcagtcgaaaaacgccgaccgaccgccctgcgtccgattagctagacggtggggtaacggcctactgtcgacgtgctcggtagctggtttgagaggatgatcagccacacggggactgggaaagggccacgactcctacgggaggcagcagcaaggaagtttccgcaatgggcgaaagcctgacggagcaacgccgcgtgtgggatgacgcttttcggagtgtaaaccactgttcgtggggacgaagcactgacggtacccacggaggaaggcccggctaactacgtgccagcagcc

SEQ ID NO: 10024 - DNA, 486 bp, unidentified
  misc_feature 1..486: note = Ascusbbf_1343839, encodes 16S rRNA
  source 1..486: mol_type = genomic DNA
agagtttgatcctggctcagaacgaacgctggcagcaggtcttaggcatgcaagtcgaacggacgacagagtggctttcccttctgtagttagtgtcgcacgagtgcgtaacgcgtgtgaaactgcccttcactggggaataacgtctggacgcggacgctaataccgcatacgcccgcccggggaaagatttatcggtgatggatggaccggcgtttggttggctttttggtgtggtaatggcctaccaaggcgatgatccatagctggtcttagaggacgatcagccacgctggaactgggacacggtccagactcctacgggaggcagcagctaagaatattgggcaatggaggaaactctgacccagccatgccgcgtgaatgaagaaggccttcggggtgtaaagttctttgaggcatgaagatgatgacagtaaggacagaaaaagcaccggctaacttcgtgccagcagccgcggtaat

SEQ ID NO: 10025 - DNA, 490 bp, unidentified
  misc_feature 1..490: note = Ascusbbf_1372156, encodes 16S rRNA
  source 1..490: mol_type = genomic DNA
agagtttgatcctggctcagaacgaacgctggcggcatgcctaacacatgcaagtcgaacgagacctccgggtctagtggcgcacgggtgcgtaacgcgtgggaacctgcccttaggttcggaataactcctcgaaaggggtgctaataccggataatgtcttcggaccaaagttttatcgcctttggatgggcccgcgtcggattctccagttgttggggtaagggctcaccagggggagaagcccgagctggtcttggaggatcataagccaaactgggactgagacacggaacatcggcctgcgaaacggcgcagactgcaacggggggcagcagaggggagtattagccaacgagggagagcctgatacggaaatgccgcgtgagggatgaaggctttagggttgtaaagctcttgtaccagggatgataatgacagtacctggagaataagctccggctaactccgtgccagcagccgcggtaat

SEQ ID NO: 10026 - DNA, 490 bp, unidentified
  misc_feature 1..490: note = Ascusbbf_1435810, encodes 16S rRNA
  source 1..490: mol_type = genomic DNA
agagtttgatcatggctcaggataaacgctggcggcgcacataagacatgaaagtagaaaggacttaatgaatgagtaaggattgagagaggggaggggaggaagggtgagtaagggagaaggaaaagggagagaagaggggaaaaaaagggggaaaagaaggagaataccgcatagggtacgagaatcacatggttcaagtgggaaaggagcaatccgctgatagatggacttatatctgattagctagttggtggggtaacggcctactacggcgacgatacgtagccggactgagaggttaaactccaccattgggactgaggtacggcccacactcctacgggaggcagaagtcgggaagattgcgaaatggaggaaactctgaggcagtgacgccgcgtgcaggaagaaggttttcggattggaaactgctttagacagggaagaaaaaagacagtacctgtagaataagctccggctaactacg

SEQ ID NO: 10027 - DNA, 490 bp, unidentified
  misc_feature 1..490: note = Ascusbbf_1372205, encodes 16S rRNA
  source 1..490: mol_type = genomic DNA
agagtttgatcctggccaggacgaacgctggcggcatgcttaacacatgcaagtcgaacggactgattccttcgggatgaaagttagtggcgaacgggtgagtaatgtatgagcaacctgcctctgtcaacgggataacagttggaaacgactgctaatacggtataagaccacggcaccgcatggtgctgcggtaaaagatttttcggacagagatgggctcatatcccattagctagttggtgagataatagcccaccaaggcgacgatgggtagccgagctgagaggctgatgggccacgttgggaatgaaacagggccacggcaccgacggaaggcagcagtggggaaggttgggcaatggaggaagctctgactcagcaatgccgcgtgagcgatgaaggtaattttattgtaaagctattttctcaggagcgaataaagatgacggtacctgaggaataagccccggctaactacgtgccagca

SEQ ID NO: 10028 - DNA, 472 bp, unidentified
  misc_feature 1..472: note = Ascusbbf_1343844, encodes 16S rRNA
  source 1..472: mol_type = genomic DNA
agagtttgatcatggttcagagcgaacgctggcggcatgcttaacacatgcaagtcgcacgaaggtttcggccttagtggctgacgggtgagtaacgcgtaggaatctatccatgggtgggggatcactctgggaaactggagctaataccgcatgatacctgagggtcaaaggcgcaagtcgcctgtggaggagcctgcgttcgattagcttgtggggggggtaatggcctaccaaggcgatgatcgatagctggtctgcgaggatgatcagccacactgggactgagacacggcccagactcctacggggggaagcaggggggaatagtggacaatgggggcaaccctgatccagaaatgccgcgtgtgtgaagaaggttttcggagtgtaaagctctttcggcggggacgatgatgacggtacccgcagaagaagccccggctaacttcgtgccagcagccgcggtaat

SEQ ID NO: 10029 - DNA, 490 bp, unidentified
  misc_feature 1..490: note = Ascusbbf_1341354, encodes 16S rRNA
  source 1..490: mol_type = genomic DNA
agagtttgatcctggctcaggacgaacgctggcggcgtgcttaacacgtgcaagtcgaacgaagcactgaaatggatttcttcggaatgatggggcggggaccgagtggcggacgggtgagtaacacgtgagcaaccggccgtgcagagcgggagagcagtgggaaacggcggagaataccgcatgacatgtgttctccgcatgaggaaaacatcaaatgattcttcgctgaaagatgggctcgcgtccgattaggtagttggtgaggcaacggctcaccaagccgacgatcggtagccggactgcaaggtcgatcgcccccattgggactgggacacggcccaggcgcctacgggaggcagcagtgggggatattgcacaatgggcgcaagcctgatgcagcaacgccgcgtgggggaggacggtcttcggattgtaaacctctgtccttggggaagaaacaaatgacggtacccttggaggaagccac

SEQ ID NO: 10030 - DNA, 490 bp, unidentified
  misc_feature 1..490: note = Ascusbbf_1436385, encodes 16S rRNA
  source 1..490: mol_type = genomic DNA
agagtttgatcatggctcaggatgaacgctagcggcaggcttaacacatgcaagtcgaggggtaacgcggggtagcaatactctggcgacgaccggcgcacgggtgcgtaacgcgtatgcaacctacctgtaacaggggtataacggagagaaatttccactaatcccccatattgttagagattcgcatgtttctctaacgaaagcttcggtggttacggatgggcatgcgtgacattagctagttggtaaggtaacgacttaccaaggcgacgatgtctaggggagctgaaaggcttatcccacaggaaggtacagaggcacggaccagactcgtgcgggaggcagggggaatgaagatgagtggatggacggaagtctgagccaggcaggccgcgtggaggaagaaggtgctatgggatgtaaactccttttgttcgagagtaataagaggcttgcgagcctcgatgagagtatcggacgaataagc

SEQ ID NO: 10031 - DNA, 490 bp, unidentified
  misc_feature 1..490: note = Ascusbbf_1321568, encodes 16S rRNA
  source 1..490: mol_type = genomic DNA
agagtttgatcctggctcaggatgaacgctagcggcaggcttaacacatgcaagtcgaggggtaacgcggggtagcaatcctctggcgacgaccggcgcacgggtgcgtaacgcgtatgcaacctacctgtaacaggggtataacggagagaaattttcactaatcctccatattgcttgagattcgcatgtttctctaacgaaatcttcggtggttacggatggacttgcgtgactttggctggttggtaaggtaacgacctaccaaggcgacgatttctaggggggctgagaggcttatcccccagactggtactgggccacggaccagactccgccgggaggcagcagtgaggaataatggtcaatggacggaagtctgaaccagccatgccgcgtggaggaagaaggtcctatgggttgtaaactccttctgttcgagagtaataagaggcttgcgagcctcgatgagagtatcggacgaataagc

SEQ ID NO: 10032 - DNA, 490 bp, unidentified
  misc_feature 1..490: note = Ascusbbf_1371565, encodes 16S rRNA
  source 1..490: mol_type = genomic DNA
agcgtttgatcatggctcaggatgaacgctagcggcaggcttaacacatgcaagtcgaggggtaacgcggggtagcaatactctggcgacgaccggcgcacgggtgcgtaacgcgtatgcaacctacctgtaacaggggtataacggagagaaatttccactaatcccccatattgttagagattcgcatgtttctctcacgaaatcttcggtggttactgatgggcttgcgtcacattagctagttggtacggtaacggcttaccatggcgacgatgtctaggtgagctgaaaggcttatcccctaaactggtactgagacacggaccagactcctacgggaggcagcagtgagaaatagtggtcaatggacggaagtctgaaccagccatgccgcgtggaggaagaaggtcctatgggtggtaaactccttgtgttcgagagtaataagaggcttgcgagcctcgatgagagtatcggacgaataagc

SEQ ID NO: 10033 - DNA, 486 bp, unidentified
  misc_feature 1..486: note = Ascusbbf_1371609, encodes 16S rRNA
  source 1..486: mol_type = genomic DNA
agagtttgatcctggctcagaacgaacgctggctgcaggtcttaggcatgcacgtcgaacggacgacagagtggcttgtcattctgaagttagtggcgcacgagtgagtaacgcgtgggaaactgcccttcactggggaataacgtctggaaacggacgctaataccgcatactcccgcaaggggaaagatttatagttgatggatttgcccgcgttgcattagcttgttggtgggttaatttcctaccaaggcgatgatccatagctggtctgagaggccgagaatccacgctgaaactgagacacggtccagactcctacgggaggcagcagctaagaatattgggcaatggaggaaacgctgacccagacatgccgcgtgaatgaagaaggccttcgggttgtaaagttcttttagtcatgaagatgatgacagtagtgacagaaaaagcaccggctaacttcgtgccagcagccgcggtaat

SEQ ID NO: 10034 - DNA, 490 bp, unidentified
  misc_feature 1..490: note = Ascusbbf_1436552, encodes 16S rRNA
  source 1..490: mol_type = genomic DNA
agagtttgatcatggctcagaacgaacgctggcggcgcgctttaagcatgcaagtcgagcggcaaggacttcggtccccagagcggcggacgggtgagtcacacgtggataatctgccctgcagtctggaataccccatggaaacatgggctaatgccggatgcgagatggaggcgatggtctttatgggaaagctcccacgggagcgctgcaggatgagtccgcggccgattagctagatggcggggtaagggcccaccatggcgacgatgggtagccggcctgagagggtggtcggccgcataggaacggagtaacggacgggacaactacggaaggcagccgctagggatcattcacgatgaacggaagtctgattgagcgaggccgggtgggcgatggaggccggaaggttggatagtacattgatggagggagaagaaccgcttcagggaatgggagcggtaggacgtgaatccatgaataagcc

SEQ ID NO: 10035 - DNA, 490 bp, unidentified
  misc_feature 1..490: note = Ascusbbf_1371562, encodes 16S rRNA
  source 1..490: mol_type = genomic DNA
agagtttgatcctggctcaggacgaacgctggcggcatgcttaacacatgcaagtcgaacggactgattccttcgggatgaaagttagtggcgaacgggtgagtaatgtatgagcaacctgcctctgtcaacgggataacagttggaaacgactgctaatacggtataagaccacggcaccgcatggtgcggcggtaaaagattgttcggacagagaggggctcacataccattagcgagtgggtgagataatagcccaccaaggcgacgatgggtagccgagctgagcggctgatcggcacaatggggactgaaacacggccccgcctcctacggcaggcagcaatggggaatattgggcaatggaggaaactctgacccagccatgccgcgtgagcgatgaaggtaattttattgtaaagctcttttctcaggaacgaataaagatgacggtgcctgaggaataagccccggctaactacgtgccagc

SEQ ID NO: 10036 - DNA, 486 bp, unidentified
  misc_feature 1..486: note = Ascusbbf_1321616, encodes 16S rRNA
  source 1..486: mol_type = genomic DNA
agagtttgatcctggctcagaacgaacgctggcggcagggctgaggcatgcaagtcgaacggacgacagagtggcttgccattctgaagttagtggcgcacgagtgagtaacgcgtgggaaacggcccttcactggggaagaacgtcgggaaacggacgctaagaccgcagacgcccgcaaggggaaagagctaccggggatggaggggcccgcgtgggattagcttgtggggggggtaagggcctaccaaggcgaggatccatagctggtctgagaggacgatcagccacgctggaacggagccacggtccagcctcctccgggcggccgctgctccgactcttgggcactggaggacactctgcccccgccctgccgcgtgaatgaagccggccttcgggttgtaaagttcttttagtcatgaagatgatgacagtagtgccagaacaagccccggctaacttcgtgccagcagccgcggtaat

SEQ ID NO: 10037 - DNA, 486 bp, unidentified
  misc_feature 1..486: note = Ascusbbf_1371511, encodes 16S rRNA
  source 1..486: mol_type = genomic DNA
agagtttgatcctgactcagaacgaacgctggcggcaggtcttaggcatgcaagtcgaacggacgccagagtggcttgccattctgaagatggtggcgcacgcgtgagtaacgcgtgggaaactacccttccctggggaataacgtctggcaacgaacgctaataccgcatccgcccgccatgggaaagatttaccggagtggagtgggccggcgttggattggcatgttggtggggtaatggcataccaaggcgatgatccatacctggtctgggaggacgatcagccacgctggaactacggcagggtgcagactccaacggtaggcagcggctaagagcatggggcaacggagtaacgtgcgagacggcgaggccgtgtgaaggaagctggccttagagttggaaagttcttgtagtcatgcagatgatgacagtagtgacagaaaaagcaccggctaacttcgtgccagcagccgcggtaat

SEQ ID NO: 10038 - DNA, 490 bp, unidentified
  misc_feature 1..490: note = Ascusbbf_1341398, encodes 16S rRNA
  source 1..490: mol_type = genomic DNA
agagtttgatcctggctcaggatgaacgctagctacaggcttaacacatgcaagtcgaggggcatcataacgaaagcttgcttttgttgatggcgaccggcgcacgggtgagtaacgcgtatccaaccttccccttagtagtgcatagcccggcgaaagtctgattaataccctatggtttcctttgatgacctctgaagtggaacaaagatttatcgctaagggatggggattcgtctgattagtttgttggcggggtaacggcccaccaaaccaacgatcagtctgggttcttaaacgaaagccaccccaaatgggtactggacaagggaccaacctcctcaggggggaagaagtgaggaatattggtcaatggcggagagcctgaaccagccaagtagagtgaaggatgacggccctatgggctgtaaactgtttttgcatgggaataaagtgagggacgtgtccctttttgtatgtaccatgagaa

SEQ ID NO: 10039 - DNA, 490 bp, unidentified
  misc_feature 1..490: note = Ascusbbf_1436380, encodes 16S rRNA
  source 1..490: mol_type = genomic DNA
agagtttgatcatggctcaggatgaacgctagctacaggcttaacacatgcaagtcgaggggcagcatgacgattgcttgcaattgttgatggcgaccggcgcacgggtgagtaacgcgtatccaaccttccctatagtagagaatagcccggcgaaagtcggattaatgctctatgttcttctttgatggcatctgacgagaagcaacggttcacctctagaggattgggatgcgtctgattagcttgttggcggggtaacgacccgccaaggcaacgatcagtggtggttatgagaggaaggtcaccaacattggaactgagacacggtccaaactcctacgggaggcagcagtgaggaatattggtcaatgggcgagagcctgaaccagccaagtagcgtgaaggatgaaggttctatgggttgtaaacttcttttgtacggggataaagagagccacgtgtagcttcttgcaagtatcggacgaat

SEQ ID NO: 10040 - DNA, 490 bp, unidentified
  misc_feature 1..490: note = Ascusbbf_1341323, encodes 16S rRNA
  source 1..490: mol_type = genomic DNA
agagtttgatcctggctcaggatgaacgctggcggcgtgcttaacacatgcaagtcgaacggagttatctctctgagtatagcttgctcaaatcttgagataacttagtgtcggacgggtgagcaacgcgtggataacctgccttatactgggggataacacttagaaataggtgctaataccgcataagttcacgttcccgcatgggaaactgtgaaaaactccggtggtgtaagattggtccgcgtctgattaggtagttggtgaggtaacggccaaccaagtcaacgatcagtagccgacctgagagggcgaacgacaacattgggactgagacacggcacaaacgcctacgggaggaagcagtggggaatattgcacaaggggggaaaccctgatgcagcggcgccgcgtgagtgaagaagtatttcggtatgtaaagctctatcagcaaggaagaaaaaaatgacggtacttgactaagaagccc

SEQ ID NO: 10041 - DNA, 486 bp, unidentified
  misc_feature 1..486: note = Ascusbbf_1435851, encodes 16S rRNA
  source 1..486: mol_type = genomic DNA
agagtttgatcatggctcagaacgaacgctggcggcaggtcttaggcatgcaagtcgaacggacgacagagtggcttgccattctcaagttagtggcgcacgagtgagtaacgcgcgggaaactgcccttcactggggaataacgtctggaaacggacgctaataccgcatacgcccgcaaggggaacgatttatcggtgacagatgtgcccgcgtgggattagtgtgttgggggggtaatggcctaccaaggcgatgaaccatatctggtctgagaggacgatcagccacgctggaactgagacacggaccaggcccctacgggaggcagcagctaagaatagtgggcaatggaggaaactctgacccagccatgccgcgtgaatgaagaaggcctgcgggttgtaaagttctagtagtcatgaagatgatgacagtagtggcagaaaaagcaccggctaacttcgtgccagcagccgcggtaat

SEQ ID NO: 10042 - DNA, 490 bp, unidentified
  misc_feature 1..490: note = Ascusbbf_1435736, encodes 16S rRNA
  source 1..490: mol_type = genomic DNA
agagtttgatcatggctcaggatgaacgctagcggcaggcttaacacatgcaagtcgaggggcagcgcggggtagcaatactctggcggcggccggcggacgggcgcgtaacgtgtgagcaacttgcccgtccctgggcggtagacactggaaacggtgtgtaatactccataacatatggattcacacgcatttatattaaatgattcgttggtgatggatgtgctcccgttacgtgatagaatgtgcgggttatgagccccccccagatacgatgtttaggggttttgagaggaaggtgctccaaactggaaatgtgacacggtccagactcttacgggaggaggcagtgaggaatattggtcaatgggcgaaagcctgaaccagccaagccgcgtgcaggaataaggccctatgggtcgtaaactgcttgtgcttgagggcaataaaggtaacgtgtggcccgatgagagtatcaggggaataagca

SEQ ID NO: 10043 - DNA, 484 bp, unidentified
  misc_feature 1..484: note = Ascusbbf_1371943, encodes 16S rRNA
  source 1..484: mol_type = genomic DNA
agagtttgatcatggctcagaacgaacgctggcggcaggtcttaggcatgcaagtcgaacggacgacagagtggcttgccattctgaagttagtggcgcacgagtgagtaacgcgtgggaaactgcccttcactggggaataacgtctggaaacggacgctaataccgcatacgcccgcaaggggaaagatttatcggtgatgggtgtgcccgcgttggattagcttgttggtggggtaatggcctaccaaggcgatgatccatagctggtctgagaggacgatcagccacgctggaacggagcaacggccccgactcctacgggaggcagaagcaaggaatattgggcaatggaggaagctcggaccaagccatgccgcgtgaatgaagaaggccttcgggttgtaaagttcttttagtaatgaagatgatgacagtagtgacagaaaacgcaccggctaactgcgggcaagcagccgcggta

SEQ ID NO: 10044 - DNA, 490 bp, unidentified
  misc_feature 1..490: note = Ascusbbf_1371951, encodes 16S rRNA
  source 1..490: mol_type = genomic DNA
agagtttgatcctggctcaggatgaacgctagctacaggcttaacacatgcaagtcgaggggcagcataacgaaagcttgcttttgttgatggcgaccggcgcacgggtgagtaacgcgtatccaaccttccccttagtaggcaaagccccggcgaaagcgggttaataccctatttttttccgtgagggcctccgaagggggataaagatttttcgcctaaggatgggggtgcgtgtgattgggttggtgggggggaaaccgcccaccaagccatcgataagtaggggttctgggggggaggtcccccacatgggtactgagacacggaccaaactcctacgggaggcagcagtgaggaatattggtcaatgggcgagagcctgaaccagccaagtagcgtgcaggatgacggccctatgggttgtaaactgcttttgcatgggaataaagtgagggacgtgtccctttttgtatgtaccatgagaata

SEQ ID NO: 10045 - DNA, 490 bp, unidentified
  misc_feature 1..490: note = Ascusbbf_1321794, encodes 16S rRNA
  source 1..490: mol_type = genomic DNA
agagtttgatcctggctcaggataaacgctggcggcacacataagacatgcaagtcgaacggacttaactcattcttaacgattgagagcggttagtggcggactggtgagtaatgtataagtaccctgcctatcagaggtgaacaacagttggaaacgactgctaataccgcatatgccacgagaatcacatggttcaagtgggaaaggagcaatccgcttatcgattgacgtatatctgattagctagttggtggggtaacggcctaccaaggagacgatcagtagccggactgggaggttaaacgacgacattgggactgagagacggcccagactagtaagagaggcagcaggcgggaagattgagcaatggaggaaacgctgacgcagtgacgccgcgggcaggaagaaggttttcggattgtaaactgctttagacagggaagaaaaaagacagtacctgtagaataagctccggctaactacg

SEQ ID NO: 10046 - DNA, 490 bp, unidentified
  misc_feature 1..490: note = Ascusbbf_1343951, encodes 16S rRNA
  source 1..490: mol_type = genomic DNA
agagtttgatcatggctcaggacgaacgctggcggcgtgcttcatacatgcaagtcgaacgagaagctctagcttgctagagtggaaagtggcggacgggtgagtaatatgtaggaaatctgccctagagagggggacaacagagggaaacttctgctaataccccatatgagcttggttgcaataccaatcttgaaaactccggtgctctaggatgagcctgcatctgattagcttgttggtggtgtaatggactaccaaggcgacgatcagtagctggtttgagaggatgatcagccaacatgggacggggacacgcccattactactacggaaggcggcagtagggcattttgcgcaatgggcgaaagcctgacgcagcaacgcggcgggaatgatgaagcccttcggggtgtaaaagtctgtcagtggggacgaattttgacggtacccacagaggaagcaccggctaactccgtgccagcagccg

SEQ ID NO: 10047 - DNA, 490 bp, unidentified
  misc_feature 1..490: note = Ascusbbf_1321809, encodes 16S rRNA
  source 1..490: mol_type = genomic DNA
agagtttgatcctggctcagaacgaacgctggcggcatgcttaacacatgcaagtcggacgggaatcgattgatagctttctattgattgagcagagtagtgcacggttgattaacacgtgggtacataccttatagtggggatcacaattggaaacgattgataataccgcatacgtcctaagggagaaaggcgcaattcgctataagagtggcccgcggaatatcaggatgttggtggggtaaaggcctaccaaacctacgccctatagctggtctgagaggacgatcagccacattaggactgagaagcggcccaaactcctacgcgaggcggcagtgaggaatattgggcaatgggggcaaccctgacccagccatgccgcgtgagtgaagaaggttttcgaattgtaaagctctttcggatgtgaagatgatgacggtagcatctaaagaagccccggcaaacttcgtgccagcagccgcggtaa

SEQ ID NO: 10048 - DNA, 365 bp, unidentified
  misc_feature 1..365: note = Ascusbbf_1321808, encodes 16S rRNA
  source 1..365: mol_type = genomic DNA
agagtttgatcctggctcagattgaacgctggcggcaggcctaacacatgcaagtcgagcggatgaggggagcttgctccctgattcagcggcggacgggtgagtaatgcctaggaatctgcctggtagtgggggacaacgtttcgaaaggaacgctaatacctcaaacgtcctacgggagaaagcagggggccttcgggccttgcgctagcagatgagccaaggtcggattggctagttgatgaggtactggcgctcctaaagcacgataagttgggaggaagggttgtaacctaataagttgcaattttgacgttaccgacagaataagcaccggctaacttcgtgccagcagccgcggtaat

SEQ ID NO: 10049 - DNA, 490 bp, unidentified
  misc_feature 1..490: note = Ascusbbf_1371874, encodes 16S rRNA
  source 1..490: mol_type = genomic DNA
agagtttgatcctggctcaggatgaacgctcgctccaggcttaacacatgcaagtcgaggggcagcataacgaaagcttgcttttgttgatggcgaccgtcgcacgggtgagtaacgcgtatccacccttccccttagtagggcatagcccggcgaaagtcggattaataccctatgttttccgttgaggccatctgaagtggcataaacatttatcgctaagggatggggatgcgtctgattaggttgttggcggggtaacggcccaccaagccatcgatcagtaggggttctgagagtacgatcctcacaattggaactgagacacgggccagactcatacgggaggcagcagtgaggaatagtgggaaatggagggaactctgacacagccatgccgcgtgagtgaagaaggttttcggattgtaaagctctttcagacgggaagatgatgacggtaccgtcagaagaagcaccggctaacttcgtg

SEQ ID NO: 10050 - DNA, 371 bp, unidentified
  misc_feature 1..371: note = Ascusbbf_1343667, encodes 16S rRNA
  source 1..371: mol_type = genomic DNA
agagtttgatcctggctcagagtgaacgctggcggcaggcctaacacatgcaagtcgaacggcagcacaggagagcttgctctctgggtggcgagtggcggacgggtgaggaatacatcggaatctgcctattcgtgggggataacgtagggaaacttacgctaataccgcatacgtcctacgggagaaagcgggggatcgcaagacctcgcgcgggtagatgcgccgatgtcagattagctggttgacggggtaatggcgcttgaaagcgacttttgttagctgagaagtcctgccgattaatactcggcggggatgacggtacccaaagaataagcaccggctaacttcgtgccagcagccgcggtaat

SEQ ID NO: 10051 - DNA, 490 bp, unidentified
  misc_feature 1..490: note = Ascusbbf_1435701, encodes 16S rRNA
  source 1..490: mol_type = genomic DNA
agagtttgatcatggctcaggacgaacgctggcggcgtgcttaatacatgcaagtcgaacgaggtccaccctttcgcacgattggggaagacctagtggcgaacgggtgcgtaacacgtgagaaacctgccccggtctctggaataccaagtggaaacacttgctactcccgtatgccgtctgccccccgcatagtggattgacgaaagatttataggctcgggagggtctcgcggccatttagcttgttggcgaggtagcggcccaccaaggcatcgaccggtagctgttctgagaggatagtcagcccacctgggacacgaacacgacccagactcctacgtggggaagcagtagggaatcttgcacaatgggcgaaagcctgatgcagcaacgccgcgggcgggaagaaggccttagggtggtaaaccgctttcagcagggaagaaaatgacggtacctacagaagaaggtgcggccaactacgtgc

SEQ ID NO: 10052 - DNA, 486 bp, unidentified
  misc_feature 1..486: note = Ascusbbf_1435716, encodes 16S rRNA
  source 1..486: mol_type = genomic DNA
agagtttgatcctggctcagaacgaacgctggctacaggtcttaggcatgcaagtcgaacggacgacagagtggcttttcattctgttgatagcggcgcacgagcgagtaacgcgtgggaaactgcccttcactaggctacaacgtctggcaacggacgtcaatatcgtactctctcgcctgggatacgatttaccggttatggatgtccctgggtcggtttagcttgttggtgcggtaattgcctatcatggcgatgatccacacctggtatggaaggacgatcagccactctggaacttggacacggaccagagtcgtacgggaggcagcagctaagagtattaggcaatggaggaaactctgacacagccacgccgcgggaaggaagaaggccttagagttgtaaagttctattagtgatgaagatgatgacagtagtgacagaaaaagcaccggctaacttcgtgccagcagccgcggtaat

SEQ ID NO: 10053 - DNA, 472 bp, unidentified
  misc_feature 1..472: note = Ascusbbf_1321804, encodes 16S rRNA
  source 1..472: mol_type = genomic DNA
agagtttgatcctggctcagagcgaacgctggcggcatgcttaacacatgcaagtcgcacgaaggtttcggccttagtggcggacgggtgagtaacgcgtaggaatctatccatgggcgggggctaactctgggaaactggagctaataccgcctgatacctgagggtcaacggcgcaagtcgcctgtggaggggcgggcgttcggttagcttgtttgtggggtaatggcctaccaaggcgaggatcgataactggtctgagaggatgatcagccacactaggactgggacacggcccagactcctacggggggcaacaggggggaatattggacaatggggtcaaccctggtccagcaatgccacgggtgtgaagaaggttttcggattgtaaagcactgtcggcgggggcgatgatgacggtacccgcagaagaagcaccggctaactccgtgccagcagccgcggtaat

SEQ ID NO: 10054 - DNA, 486 bp, unidentified
  misc_feature 1..486: note = Ascusbbf_1435816, encodes 16S rRNA
  source 1..486: mol_type = genomic DNA
agagtttgatcatggctcagaacgaacgctggcggcaggtcttaggcatgcaagtcgaacggacgacagagtggctttccattctgacgttagtggcgcacgagtgagtaacgcgtgtgaaactgtccttcactggggaataacgtctggcaacggtcgctattaccgcatacgcccgcaaggggaaagatttatcggcgacggatgcgcgcgcgttggattagcttcttggtgggttaagggcgtaccaaggggatgatccatagctggtctgagaggacgatcagctacgctggaactgagacacgggccggacagctacgggaggcagcagctacgaatattgggcaatggaggagactctaacccagccatgccgcgtgaatgaagaaggccttcgaggtagaaagttcttatagtcatgaagatgatgacagtagtgacagaaaaagcaccggctaacttcgtgccagcagccgcggtaat

SEQ ID NO: 10055 - DNA, 490 bp, unidentified
  misc_feature 1..490: note = Ascusbbf_1435822, encodes 16S rRNA
  source 1..490: mol_type = genomic DNA
agagtttgatcatggctcaggatgaacgctagcggcaggcttaacacatgcaagtcgaggggtaacgcggggtagcaatactctggcgacgaccggcgcacgggtgcgtaacgcgtatgcaacctacctgtcacaggggtataacggagagaaatttccactaatcccccatattgttattctttcgcatgttaggataacgaaagcttcggtggttacggatgggcatgcgtgacattagctagttggtaaggtaacggcttaccaaggcgacgatgtctaggggagctggggggcttatagcccaaacgggtaagtcgacacgaaccggacggcgacggggggcagaagggaggaagagtggtcaatggacggaagtctgaaccagccatgccgcgtggaggaagaaggtcctatgggtaggaaactcctttggttcgagagtaataagaggcttgcgagcctcgatgagagtatcggacgaataagc

SEQ ID NO: 10056 - DNA, 490 bp, unidentified
  misc_feature 1..490: note = Ascusbbf_1344004, encodes 16S rRNA
  source 1..490: mol_type = genomic DNA
agagtttgatcctggctcaggatgaacgctggcggcgtgcctaacacatgcaagtcgaacggaaaggattcttcggaattccttcagtggcggacgggtgagtaacgcgtgggtaacctgtcccatacaggggaacaacagctggaaacggctgctaataccgcataagcgcacagtactgcatggtacagtgtgaaaagattttatcggtatgggatggacccgcgtctgataagaaagttggaggggtaacggcccaccaaggcgacgttcagtagccgacctgagagggtgaccggcgacaaagggactgggcaacggcccaaactcctacggggggcagcagtgggggatatgacacaatgggcgaaagcctgatgcagcgacgccgcgtgggggaggaagtatttcggtatgtaaagcgctatcagcagggaagaaaatgacggtacctgactaagaagccccggctaactacgtgccagcagcc

SEQ ID NO: 10057 - DNA, 486 bp, unidentified
  misc_feature 1..486: note = Ascusbbf_1372136, encodes 16S rRNA
  source 1..486: mol_type = genomic DNA
agagtttgatcatggctcagaacgaacgctggcggcaggtcttagacatgcaagtcgaacggccgacagagtggcttgccattctgaagctagtggcgcacgagtgagtaactcgtgcgaaactacccttcactggggaataacgtcgggcaacggacgctaataccgcatacgcccgcaaggggaaatgtctatcggttatggatatgccgtcgttgcattagcgtgttgatgggaaaagttcgtaccacggcgaggatgcatacctggtctgggaggacgatcagccacgatggaactacgacagggaccagtgtggtacatgggtcagcagctaagaatatgaggcaatggagtagcgtctgacacggcggtgccgcgggaaggaagaaggctttctgcttgtaaagatcttttggtgatgcagatgatgacagtagtgaaagaaaaaggaccggctaactccgtgccagcagccgcggtaat

SEQ ID NO: 10058 - DNA, 490 bp, unidentified
  misc_feature 1..490: note = Ascusbbf_1343852, encodes 16S rRNA
  source 1..490: mol_type = genomic DNA
agagttgatcctggctcaggatgaacgctggcggcgtgcttaacacatgcaagtcgaacggagttatctcgcttaggagggcttgctcaaatcttgatagaacttagtggcggtcgggtgagtaccgcgtggctaacctgccttatactggggtttaacacttagatataggtgctaataccgcataagcgcacgttcccgcatgggaaagtgtgatagtctccggtggtgtaagatggatgagcgtctgattagatagtgtgtgcgtaaccgccccaccaagtcaacgatcagtagccggccagagggggtgaacgaccacattgggactgcgaaacggcgcaaactcctacgggaggcagcagtggggaatagtgcacaatgggggaaaccctgatgcagcgacgccgcgtgagtgaagaagtagttcggtatgtaaagctctatcagcaaggaagaaaaaaatgacggtacttgactaagaagcacc

SEQ ID NO: 10059 - DNA, 490 bp, unidentified
  misc_feature 1..490: note = Ascusbbf_1344013, encodes 16S rRNA
  source 1..490: mol_type = genomic DNA
agagtttgatcatggctcaggatgaacgctggcgtcgtgcctaacacatgcaagtcgaacggaaagaattcttcggaattctttcagtggcggacgggtgagtaacgcgtgggtaacctgccccatacaggggaacaacagcttgaaacggctgctaataccgcataagcgcacagtactgcatggtacagtgtgaaaagattttatcgctatgggatggacccgcggaggattagctagttggaggggtaacggcccaccaaggcgacgatcagtagccgacctgagagggtgaccggcaacattgggactgagacagggcacaaagacctacgggaggcagcggtggggggtattggacaatgggcgaaagtctgatgcagcgacgcggcgtgagtgaggaagtatttcggtatgtaaagctctatcagcagggaagaaaatgacggtacctgactaagaagccccggctaactacgtgccagcagcc

SEQ ID NO: 10060 - DNA, 342 bp, unidentified
  misc_feature 1..342: note = Ascusbbf_1372302, encodes 16S rRNA
  source 1..342: mol_type = genomic DNA
agagtttgatcatggctcaggatgaacgctagcggcaggcttaacacatgcaagtcgaggggtaacgcggggtagcaatactctggcgacgaccggcgcacgggtgcgtaacgcgtatgcaacctacctgtaacaggggtataacggagagaaatttccactaatcccccatattgttattctttcgcatgttaggataacgaaagcttcggtggttacggatgggcatgcgtgacgttagctagttggtaaggtaacgagttaaaaaggcgctttgcgctaccggatgagagtatcggacgaataagcatcggctaactccgtgccagcagccgcggtaat

SEQ ID NO: 10061 - DNA, 486 bp, unidentified
  misc_feature 1..486: note = Ascusbbf_1321963, encodes 16S rRNA
  source 1..486: mol_type = genomic DNA
agagtttgatcctggctcagaacgaacgctggcggcaggtcttaggcatgcgagtcgaacggacgacagagtggcttgccattctgaagttagtggcgcacgagtgagtaacgcgtgggaaactgcccttcactggggaataacgtctggaaacggacgctaataccgcatacgccctcaaggggaaagatttatcggttatggttctacccgcgtgggattagcttgttggtgggggaatggcctaccaatgggatgatccctagcttgtctgtgagtacgatcagcctcgcgggaactgagacacggtccagacgcctacgggaggcagcagctaagaatattgggcaatggaggaaactctgacccagccatgccgcgtgaatgaagaaggccttcgggttgtaaagttcttttagtcatgaagatgatgacagtagtgacagaaaaagcaccggctaacttcgtgccagcagccgcggtaat

SEQ ID NO: 10062 - DNA, 490 bp, unidentified
  misc_feature 1..490: note = Ascusbbf_1372283, encodes 16S rRNA
  source 1..490: mol_type = genomic DNA
agagtttgatcctggctcaggatgaacgctagcgacaggcctaacacatgcaagtcgaggggcagcaggggagcaatcccgctggcgaccggcgcacgggtgagtaacgcgtatgtaacctgcccatgagtgggggatagcccagcgaaagctggattaataccgcatgaaaccgtttgaagacatctgataatggttaaagatttattgctcatggatggacatgcgtccgattagctagttggcggggcaacggcccaccaaggcgacgatcggtaggggttctgagaggaaggtcccccaaagtgggagcgggaaaacgaacaaactgcgaagggggggaggaaggaagaaagatgggacaatgggaggaagcagaacccagccaagtccggagaaggatgagggtattatgttgtgaaaacttctttagcggtggagtaataggggggtggagacaacgaaggcaagaacactagaaataggggtc

SEQ ID NO: 10063 - DNA, 490 bp, unidentified
  misc_feature 1..490: note = Ascusbbf_1321956, encodes 16S rRNA
  source 1..490: mol_type = genomic DNA
agagtttgatcctggctcaggatgaacgctagcggcaggcttaacacatgcaagtcgaggggcagcgcggggtagcactactctggcggcgaccggcggaagggtgcgtaacgcgtgagcaacatgcccgtggcagggggataagcgatggcaacgtcgtctaagaccccgtcacaacagacctcgcatggggtttgtttgaaagcttcggcggccacggatttgctcgcgtcccattaggcagtgggcggggtaacggcccaccaaaccgacgatgggtaggggttcggagaggaaggtaccgtacagtggaactgaggcaccgtccagaatcggacggcaggcagcggggaggaagattggtcgatgggcggaagcctgaaccagccatgcagcgtgcaggaataaggcccgacgggtcgtaaactgcttttggacgggagcaataagggtcaagagtggcctgatgagggtaccgtacgaataagca

SEQ ID NO: 10064 - DNA, 490 bp, unidentified
  misc_feature 1..490: note = Ascusbbf_1344054, encodes 16S rRNA
  source 1..490: mol_type = genomic DNA
agagtttgatcctggctcaggatgaacgctagcggcaggcttaacacatgcaagtcgaggggtaacgcggggtagcaatactctggcgacgaccggcgcacgggtgcgtaacgcgtatgcaacctacctgtaacaggggtataacggagagaaatttccactaatcccccagattgttattctttcgcatgttaggataacgaaagcttcggttgttacggaagggcatgcgtgacaatagctagttggtaaggtaacggcttaccaaggagacgatgtctaggggagctgagaggcttatcctccacactggtactgagaaccgaaacagactccgacgggaggcagaagcgcggaatattggcaactggacggaagactgaacaagcgaggccgcgtggaggaggaaggtccgaggggttgtaaactgcttttgttcgagagtaataagggctttgcgaagcacgatgagagtatcggacgaataagc

SEQ ID NO: 10065 - DNA, 490 bp, unidentified
  misc_feature 1..490: note = Ascusbbf_1435669, encodes 16S rRNA
  source 1..490: mol_type = genomic DNA
agagtttgtcatggctcaggatgaacgctagctacaggcttaacacatgtaagtcgagggggagaagaacgaaagggggcggggggggcgggagaacggggcacgggtgagtaacgcgtatccaaccttccccttagtagggcatagcccggcgaaagtcggattaataccctatgttttccgttgaggacatctgaagtggaacaaagatttatcgctaagggatggggatgcgtctgattaggtggttggcggggtaacggcccaccaagccatcgatcagtaggggttctgagaggaaggtcccccacataggtcctgagacacggcccaaactcctacggggggcagcagtgaggaatattggtcaatgggcgagagcctgaaccagccaagtagcgtgcaggatgacggccctatgggttgtaaactgcttttgcatgggaataaagtgagggacgtgtccctttttgtatgtaccatgagaata

SEQ ID NO: 10066 - DNA, 490 bp, unidentified
  misc_feature 1..490: note = Ascusbbf_1341639, encodes 16S rRNA
  source 1..490: mol_type = genomic DNA
agagtttgatcctggctcaggacgaacgctggcagcatgcttaacacatgcaagtcgaacggactgattccttcgggttgacctttcgtggcgaacgggtgagtaatgtatgatcaacctgcctctgtcaacgtgctaacagttggaaacgcctgctaatacggtatacgaccacggcaccgcatggtgctgcggtaaacgatgtttcggacagagatgggctcatatcccattagctggttgggaagataatagcccaccaaggcgacgctgggtagccgagttgagaggctgatcggccacatagggactgacagacggcccagagtcctacgggaggcagcagtggggaagagtgggcaatggaggaaactctgacaaagcaatgccgcgtgagcgatgaaggtaagtttattgtaaagctcgtttctaaggaacgaataaagatgacggtaccggaggaataagccccggctaactacgtgccagc

SEQ ID NO: 10067 - DNA, 490 bp, unidentified
  misc_feature 1..490: note = Ascusbbf_1341642, encodes 16S rRNA
  source 1..490: mol_type = genomic DNA
agagtttgatcctggctcaggacgaacgctggcagcatgcttaacacatgcaagtcgaacggactgattccttcgggttgacagttagtggcgaacgggtgagtaatgtatgagcaacctgcctctgtcaacgtgataacagttggaaacgactgctaatacggtataagaccacggccccgcatggtgctgcggtaaaagctttttcggacagagatgggctcatatcacattagctcgtgggtgggataatggcccaccaaggcgacggtgggtagccgcgttgagaggctgatcggcaacaatgggactgaaacacggcccagactcctacgggaggcagcaggggggaatagtgggcaatggaggaaagtctgacaaagcaatgccgcgtgagcgatgaaggtaagtttatgggaaagctcgtttcgaaggaacgaataaagatgacggtaccggaggaataagccccggctaactacgtgccagc

SEQ ID NO: 10068 - DNA, 490 bp, unidentified
  misc_feature 1..490: note = Ascusbbf_1341630, encodes 16S rRNA
  source 1..490: mol_type = genomic DNA
agagtttgatcctggctcaggatgaacgctggcggcgtgcttaacacatgcaagtcgaacggagttatctcgctgaggagagcttgctcaaatcttgagataacttagtggcggacgggtgagtaacgcgtggataacctgccttataccgggggataacacttagaaataggtgctaataccgcataagcgcacgatcccgcatgggaaagtgtgaacaactccggtggtataagatggatccgcgtttgattagatagttggggaggtaagggcccaccaagtcaacgatcagtagccgacataagtgggagagcgacaacattgggactgagacacggcccaaaagcctacgggagggagaagtggggaagattgcgaaatgggggaaaacctgatgcagcgacgccgcgtgagggaagaagtatttcggtatgtaaagctctatcagcaaggaagaaaaaaatgacggtacttgactaagaagccc

SEQ ID NO: 10069 - DNA, 490 bp, unidentified
  misc_feature 1..490: note = Ascusbbf_1371799, encodes 16S rRNA
  source 1..490: mol_type = genomic DNA
agagtttgatcatggctcaggatgaacgctagcggcaggcttaacacatgcaagtcgaggggtaacgcggggtagcactactctggcgacgaccggggcacgggtgcgtaacgcgtatgcaacctacctgtaacaggggtataacggagagaaatttccactaatcccccatatcgttattctttcgcatgttaggataacgaaagcttcggttgttacggatgggcatgcgtgacattagctagttggtaaggtaacggcttaccaaggcgacgatgtctaggggagctgagaggcttatcccacaaacgggtacggagacacggaccagaatcctacggggggcagcagtgaggaatagtggacaatggacggaagtgtgaaccagccatgcagcgtggaggaagaaggtcctatgggtggtaaactccttttgttcgagagtaagaagaggagtgcgagcaccgatgagagtatcggacgaataagc

SEQ ID NO: 10070 - DNA, 490 bp, unidentified
  misc_feature 1..490: note = Ascusbbf_1341641, encodes 16S rRNA
  source 1..490: mol_type = genomic DNA
agatttgatcatggctcaggatgaacgctagctacaggcttaacacatgcaagtcgaggggaaacgatattgaaagcttgctttcgataggcgtcgaccggcgcacgggtgagtaactcgtatccaacctgcctggaaatagggactaatccgtggaaacgcggcctaatgtcctatgtgctccgaagaggacatctgatttggagtaaagattcatcgtttccggatggggatgcgtctgattagcttgctggcggggtaacggcccaccagggcgacgatcagtaggggttctgcgaggaaggccccgagcagtggaactgagagacggtccaaaagcctacgggaggcagcagtgaggaagattggtcaatggacgagagtctgaaccagccaaggagcgtgaaggaggacggccctatgggttgtaaactgcttttatgcggggataaagtgcgcaacgtgtggtgtattgcaggtaccgcaagaa

SEQ ID NO: 10071 - DNA, 490 bp, unidentified
  misc_feature 1..490: note = Ascusbbf_1436139, encodes 16S rRNA
  source 1..490: mol_type = genomic DNA
agagtttgatcatggctcaggatgaacgctagcggcaggcttaatacatgcaagtcgaggggtaacgcggggtagcaatactctggcgacgcccggcccccgggtgcgtaacgcgtttgcaacctccctgtaacaggggtataacggagagaaatttccactaatcccccatattttttttctttcccatgttaggataacaaaagctccgttgtttacggatggccaggcgtcacattagtgatttgttaaggtaacgccttaccaaggcgaggttggcatggggagctgagaggcttatcccccacactggtacggagacacggaccagactcctacgggaggcagcagtgaggaatattggtcaatggacggaagtctgaaccagccatgccgcgtggaggaagaaggtcctatgggttgtaaactccttttgttcgagagtaataagaggcttgcgagcctcgatgagagtatcggacgaataagc

SEQ ID NO: 10072 - DNA, 490 bp, unidentified
  misc_feature 1..490: note = Ascusbbf_1371453, encodes 16S rRNA
  source 1..490: mol_type = genomic DNA
agagtttgatcatggctcaggatgaacgctagctacaggcttaacacatgcaagtcgaggggcagcagatcgaaagcttgcttttgatgctggcgaccggcgcacgggtgagtaacgcgtatccaaccttccctatagtagaggatagcccggcgaaagtcggattaatactctatgttgtatttcgaggacatctgaagaataccaaaggtttaccgctataggatggggatgcgtctgattaggttgttggcggggtaacggcccaccaagcccacgatcagtaggggttctgagaggaacggcgccaagatcgagactgcgacggggcgcagacgcctacgagaggcagcagtcgggagtattgcgaaatggaggaaaagcggacggagtgacgccgcgtgcaggaggaaggtgctcggattgtaagctgcagtagagagggaagaaaaaaatgacggtacctattgaataagcaccggctaactac

SEQ ID NO: 10073 - DNA, 490 bp, unidentified
  misc_feature 1..490: note = Ascusbbf_1436175, encodes 16S rRNA
  source 1..490: mol_type = genomic DNA
agagtttgatcctggctcaggatgaacgctagctgcaggcttaacacatgcaagtcgaggggcaacgtggggtagccatactctggcgacgaccggcccacgggtgcgtaacgcgtatgcaacctacctttcacaggggtataacggagcgaaatttccactaatcccccctctttttattctttcgcatgcaaggataacgaaagcttcggtggttacggatgggcatgcgtgactttagttagttggtaggttaacggcataccaaggcgacgatgtctaggggagcttagaggcttatcccccacactggaactgagacacggaccagactcctacgggaggcagcagtgaggaatattggtcaatggacggaagtctgaaccagccatgccgcgtggaggaagaaggtcctatgggttgtaaactgcttttgttcgggagtaataagagctatgcgaagcccgatgtgggtatcggacgaataagc

SEQ ID NO: 10074 - DNA, 490 bp, unidentified
  misc_feature 1..490: note = Ascusbbf_1341565, encodes 16S rRNA
  source 1..490: mol_type = genomic DNA
agagtttgatcctggctcagagcgaacgctagcggaatgctttatacatgcaagtcgaacggattttgatttttgtagcaatacaaagattacgattagtggcgaacgggtgagtaatagttaggaacttgccgaatagtgggggacaacagttagaaatgactgctattaccgcatactcccgagaggggaaagatttattgcgattcgagaggccgaaccacgattagcttgttggcggtgtaattgccaaccaaggcagtgatcgttagccgatcttagaggatgatctgccacattgagactgagacgcggcacaaactcctaagggaggcagcagtagggaatattggacaatggacgcaggtctgatccagcaattccgcgggggtgaagaaggtgttatgcagtgtaaaactctttggcccatgaagacaatgacggtagtgtgagaataagcaccgactaactatgtgccagcagccgcggt

SEQ ID NO: 10075 - DNA, 484 bp, unidentified
  misc_feature 1..484: note = Ascusbbf_1436211, encodes 16S rRNA
  source 1..484: mol_type = genomic DNA
agagtttgatcatggctcaggatgaacgctggcggcgtgcttaacacatgcaagtcgaacggagaaccgcccttcgggtcggttcttattggcgtacgggtgagtaacacttgggaacataccttatagtgggggataactattggatacgcttgataataccgcattagtcctaagggagaatggtgtaattcgccataagattgtcccgcggtagtttaggcagttggtggggtcaacgccttcataacctacgatcgttacctggtctgagaggactatcagccacattgggaccgagacacggctcaaagagcaacggtgggcagcagtgaggaatattaggcaatgggggcaaccctgactcagccatgccgcgtgagtgaagaaggttttcgaattgtaaagctctttcggatgtgaagattatgacggtagcatctaaagaagccccggcaaactccgtgccagcagccgcggtaat

SEQ ID NO: 10076 - DNA, 490 bp, unidentified
  misc_feature 1..490: note = Ascusbbf_1436214, encodes 16S rRNA
  source 1..490: mol_type = genomic DNA
agagtttgatcatggctcagaatgaacgctggcggcatggattaggcatgcaagtcgaacgggtcccttcggggactagtggcgcaagggtgagtaacacgtgatcaacctgcccccgaatccggaataatccagggaaacttggtctaaaaccggatgtcggcgtttacccgcatgggtttccgccgaaatattcatagttcggggatgggctcgcgtcccattagctggttggctgggtaactgcccaccaaggctacgacgggtaggtgtgctgtgaggatggtcacccacactgggactgggacactgcgcagacgcctacgcgagggtgaagtggagagtatacagcaaagggcgcaagcctgacggagcgatgccgcgtgaggaaagagggccttcgggttgtaaacctctgtcacccgggacgaaatcaatgacggtaccgggaaaggaagccacggctaaccacgtgccagcagccgcggta

SEQ ID NO: 10077 - DNA, 490 bp, unidentified
  misc_feature 1..490: note = Ascusbbf_1371801, encodes 16S rRNA
  source 1..490: mol_type = genomic DNA
agagtttgatcctggctcaggatgaacgctagcggcaggcttaacacatgcaagtcgaggggtaacgcggtgtatcattactctggctactaccggcgcacgggtgcgtaactcgtatgcaacctacctttaccatggttataacggagagaaatttccactaatcccccctcttttttgttatttgcatgtttctctattgaaagcttcgtttgttactgttgggcatgcgtgcctttggatagttggtaaggtaacggcttaccaaggcgacgttgtctaggggggcgtagaggcttttccccaacactggtacggagacacggtccaaactcctacgggaggcagcagtgaggaatattgggcaatggacggaagtctgaaccagccatgcagcgtggaggaagaaggtcctatgggttgtaaactccttttgtgcgagagtaataagaggcatgcgagccgagatgagggtatcggacgaataagc

SEQ ID NO: 10078 - DNA, 490 bp, unidentified
  misc_feature 1..490: note = Ascusbbf_1341600, encodes 16S rRNA
  source 1..490: mol_type = genomic DNA
agagtttgatcctggctcaggatgaacgctagctacaggcttaacacatgcaagtcgcggggcatcgcgaagggtatcaatactctttggcggcgaccggcggatgggtgagtaccgcgtatccaccctgtccctgtctcgggcacagcccctcgaaagagggattcattcccgatttccccgtcagttcgcatgttcttccgggcacatgtcttcatctgatcgggatggggatgcgttccattaggcggtcgccggggtaacggcccaccgagcctacgatggataggggatcggacaggaaggcacacggcaatgggactgagaaccggcccggactcgtacgggagggagcagtgaggaatattggtcgatggcggcaacgctgaaccagccaagtagcgtgagggattacggccctatgggtcttaaacctcttttgttggggagcaacctgtgcaacttgtggcacactgcgagtacccttcga

SEQ ID NO: 10079 - DNA, 490 bp, unidentified
  misc_feature 1..490: note = Ascusbbf_1436115, encodes 16S rRNA
  source 1..490: mol_type = genomic DNA
agagtttgatcatggctcaggatgaacgctagcggcaggcttaacacatgcaagtcgaggggcagcgcggggtagcaatactctggcggcgaccggcggaagggtgcgtaacgcgtgagcaacttgcccgtcactgggggataggcactggaaacggtgtgtaatactcgataacatttggattcacatggctttatattgaaagattcgttgttgacggatggactcgcgttacattagctagtcggctgggtaccggcccacctcgcctacgatgtttaggggttctgggaggaagctacaccacatggaaactgagaaacggtcaagactagtacgggaggcagcagtgaggaatattggtcgaggggcggaagcctgaaccagccaagccgcgtgcaggaagaaggccctatgggtcgtaaactgcttttccatgagggcaataagggtcacgtgtggtccgatgagagtatcagatgaataagca

SEQ ID NO: 10080 - DNA, 490 bp, unidentified
  misc_feature 1..490: note = Ascusbbf_1341617, encodes 16S rRNA
  source 1..490: mol_type = genomic DNA
agagtttgatcctggctcaggatgaacgctagcggcaggcttaacacatgcaagtcgaggggcagcgcggggtagcaatactctggcggcgaccggcggacgggtgcgtaacgcgtgagcaacttgcccgtcactgggggataggcactggaaacggtgtgtaatactccataacatatggattcacatggattcatattgaaatattcgtcggtgacggatgggctcgcgtaacattagctagtcggcggggtaacggcccaccggggctacgatgtttaggggttctgagaggaaggtccccgcaattgaagctcagacagggtccagactccgacgggaggcagaagtgaggaagattggtcaatgggcggaagcctgaaccagccaggcggcgtgcaggaataaggccctatgggtcgtaaactgcttttcctggagggcaataagggcacgagtggcccgatgagagtatcaggggaataagcac

SEQ ID NO: 10081 - DNA, 490 bp, unidentified
  misc_feature 1..490: note = Ascusbbf_1436144, encodes 16S rRNA
  source 1..490: mol_type = genomic DNA
agagtttgatcatggctcaggatgaacgctagcggcaggcttaacacatgcaagtcgaggggcagcgcggggtagcaatactctggcggcgaccggcggaagggtgcgtaacgcgtgagcaacttgcccgtcactgggggataggcactggaaacggtgtgtaatactccataacatatggattcacatggattcatattgaaagattcgttggtgacggatgggctcgcgtaacattagctagtcggcggggtaacggcccaccgaggctacgatgtttaggggttctgagaggaaggtcccccacactggaaacgagaaacggtcccgaatcccacgggaggcaggcgtgaggaaacatggtcaatgggcggaagcctgaacccaccatgccgcggtcaggaataaggccctatgggtcgtaaactgcttttccttgagggcaataagggtcacgtggggtccgatgagagtatcaggggaataagca

SEQ ID NO: 10082 - DNA, 490 bp, unidentified
  misc_feature 1..490: note = Ascusbbf_1371763, encodes 16S rRNA
  source 1..490: mol_type = genomic DNA
agagtttgatcctggctcaggatgaacgctagcgacaggcttaacacatgcaagtcgaggggcaacgcggggttagaatactctcgcgacgaccggcgcacgcttgcgtgacgcacatgtaacctacctgtaacagtggtataacgaacacgaatatacactaatcccccctattgtttgagattcgcatgtttctctaacgtaacctacgttggccagtgatgggcatgcgtgacattagctagttggtaagggaacgccttaccaagccgacgatgtctaggggggctgagaggctggtcccccacactggtactgagacacggaccagactcctacgggaggcagcagtgaggaatattggtcaatgggcggaagcctgaaccagccaagccgcgtggaggaagacggccctatgggttgtaaactgcttttgtccgggagtaataagaggcacgcgagcctcgatgagagtaccggacgaataagc

SEQ ID NO: 10083 - DNA, 485 bp, unidentified
  misc_feature 1..485: note = Ascusbbf_1341614, encodes 16S rRNA
  source 1..485: mol_type = genomic DNA
agagtttgatcctggctcagaacgaacgctggcggcaggtcttaggcatgcaagtcgaacggacgacagagtggcttgccattctgaagttagtggcgcacgagtgagtaacgcgtgggaaactgcccttcactggggaataacgtctggacacggacgctaataccgcatacgcccgcaaggggaaagatttatcggtgatggatgtgcccgcgttggattagcttgttggtggggtaatggcctaccaaggcgatgatccatagctggtctgagaggacgatcagccacgctggaacacggacacgggcaggacgcatacgtgaggaagcagctaagaatagagggcaatgaggggagctctgaacgagccatgcagggggaatgaagaaggcctacaggttgtaaagttcatggagtcatgaagatgatgacagacgggacggaaaaagaacgggctaacatggtgcaagaggccgcgtaat

SEQ ID NO: 10084 - DNA, 490 bp, unidentified
  misc_feature 1..490: note = Ascusbbf_1436136, encodes 16S rRNA
  source 1..490: mol_type = genomic DNA
agagtttgattatggctcaggatgaacgctagctacaggcttaacacatgcaagtcgaggggcagcatgtagctggcttgccagatatgatggcgaccggcgcacgggtgcgtaacgcgtatccaacctgccgtttacccggggacagcctcgcgaaagcgagattaatacccgatgttgtgcgtagtccgcatggggtgcgcaccaaaggattttccggtaagcgatggggacgcgtacgattagctggtcggcggggtaacggcccaccgaggcatcgatcgttaggggttctgagaggatggccccaccacctgggactgagccacggcccagacgcctacgggaggcagcagtgacgaatattcgtcaatgggcgtaagcctgaaccagccaagtagcgtgcaggacgactgccttacaggttgtaaactgcttttatgcgggggtaaagtgtcccacgtgtgggatattgcacgtaccgcatgaa

SEQ ID NO: 10085 - DNA, 490 bp, unidentified
  misc_feature 1..490: note = Ascusbbf_1341635, encodes 16S rRNA
  source 1..490: mol_type = genomic DNA
agagtttgatcatggctcaggatgaacgctagtggcaggcttaacacatgcaagtcgaggggtaacgcgggggagcaatactctggcgacgaccggcgcacgggggcgtaacgcgtatgcaaccgacctgtaacagggggagaacggagagaaatgtccactaatcccccatatttttattctttcgcatgttaggataacgaaagcttcggtggtgacggatgggcatgcgtgacattagctagttggtaaggtaacggcttaccaaggcgacgatgtctaggggagctgagaggcttatccgcacacatgggacggggttccggcccagaatcctacgcaaggaagccgtgcggaatattcggcaatggacggaagtctgaaccagccatgcagcgtggaggaagaaggtcctatgggttgtaacctccttttgttcgagagtcataagggctttgcgaagaccgatgagcgtatcggacgaataagc

SEQ ID NO: 10086 - DNA, 490 bp, unidentified
  misc_feature 1..490: note = Ascusbbf_1341629, encodes 16S rRNA
  source 1..490: mol_type = genomic DNA
agagtttgatcatggctcaggatgaacgctagcggcaggcttaacacatgcaagtcgaggggtaacgcggggtagccttactctgtctactaccggcccacgggtgcgtaacgcgcatgcaacctacctgtaccagggttataacggagagaaatttccactaatcccccctattttttttctttcgcatgtttggataacgaaagcttcgtttgttacggatgggcatgcgtgccattagctagttggtaagctaacggcctaccaaggcgacgatgtctaggggagctgagaggcttatcccccacactggaactgcgacacggaccaaactcctacgggaggcagcagtgaggaatattggtcaatggacggaagtctgaaccagccatgcagcgtggaggaagaaggtcctatgggttgtaaactccttttgtacgggagtaataagaggcatgcgagccgcgatgagagtatcggacgaataagc

SEQ ID NO: 10087 - DNA, 468 bp, unidentified
  misc_feature 1..468: note = Ascusbbf_1341653, encodes 16S rRNA
  source 1..468: mol_type = genomic DNA
agagtttgatcctggctcagagcgaacgctggcggcaggcttaacacatgcaagtcgagcgccccgcaaggggagcggcagacgggtgagtaacgcgtgggaagctacccagcgctacggaataactcagggaaacgggtgcgaataccgtatacgcccttcgggggaaagatttaccggagatggatgagcccgcgtgggatgagctaggtggtgaggtaaaggctcaccaaggcgacgatccatagctggtctgagaggatgatcagccacactgggacggagacacggcccagactcctacgcgcggcagccgtggggaatcttggcccctgggcgccagcctgctcctgccctgccgcgtgagtgatgacggccctagggttgtaaagctctttcaccggtgaagataatgacggtacccggagaagaagccccggctaacttcgtgccagcagccgcggtaat

SEQ ID NO: 10088 - DNA, 375 bp, unidentified
  misc_feature 1..375: note = Ascusbbf_1341654, encodes 16S rRNA
  source 1..375: mol_type = genomic DNA
agagtttgatcatggctcaggatgaacgctagctacaggcttaacacatgcaagtcgaggggcagcgagaggaaagcttgctgtccttgtcggcgaccggcgcacgggtgagtaacgcgtatccaaccttccccttagtagggcatagcccggcgaaagtcggattaacaccctatgttatcagaagaggacatctggcttggattaaagatttagcgctatgggatggggatgcgtctgattaggtagtaggcggggtaacggcccaccgggtcgtagaccagtaggggttctgagaggagtgggggacttgtcccttttggtaggtaccgtatgaataaggaccggctaattccgtgccagcagccgcggtat

SEQ ID NO: 10089 - DNA, 490 bp, unidentified
  misc_feature 1..490: note = Ascusbbf_1341634, encodes 16S rRNA
  source 1..490: mol_type = genomic DNA
agagtttgatcatggctcaggatgaacgctagtggcaggcttaacacatgcaagtcgaggggtaacgcggggtagcaatactctggcgacgaccggcgcacgggggcgtaacgcgtatgcaaccgacctgtaacagggggagaacggagagaaagttccactaatcccccatattgttattctttcgcatgtgaggataacgaaagcttcggtggttacggatgtgcaggcgtgacattagctagttggtaaggtaacggcttaccaaggcgacgatgtctaggggagctgagaggcttatccccaacactgtgactgggttacggcccagactcctacgggaggcagccgtgaggaatattggtcaatggacggaagtctgaaccagccatgccgcgtggaggaagaaggtcctatgggttgtaacctccttttgttcgagagtaataagggctgtgcgaagcccgatgagcgtatcggacgaataagc

SEQ ID NO: 10090 - DNA, 468 bp, unidentified
  misc_feature 1..468: note = Ascusbbf_1341643, encodes 16S rRNA
  source 1..468: mol_type = genomic DNA
agagtttgatcctggctcagagcgaacgctggcggcaggcttaacacatgcaagtcgagcgccccgcaaggggagcggcagacgggtgagtaacgcgtgggaatctaccaatctctacggaataacgcagggaaacgggtgctaataccgtatacgccctgcgggggaaagatttatcggagatggatgagcacgctttggatgagctagttggtgaggtaaaggctcaccaaggcgacgatccatagctgggcggagaggatgagcagcccccctgggactgagacacggcccagactcctacgggcggccgccgtggggactcttggccactcggcgcacgcctgttcccgccctgccgcgtgcgtgatgacggccctagggttgtaaagctctttcaccggtgacgataatgacggtacccggagaagacgccccggctaacttcgtgccagcagccgcggtaat

SEQ ID NO: 10091 - DNA, 490 bp, unidentified
  misc_feature 1..490: note = Ascusbbf_1371616, encodes 16S rRNA
  source 1..490: mol_type = genomic DNA
agagtttgatcctggctcaggatgaacgctagctacaggcttaacacatgcaagtcgaggggcaacgagagcttaagtttctaatagttctgggaacccgcgcgcatgggtgtgacacgtgtaccaccttcgccgtaatgtagcgtaccgcgttgcgaatgtaagttttatgctctatgtgctgtgatgaggatatgtgcattgcagaaaagttttagcgctttgcgatggggatgtgcgtgattaggttgttggcggggtaagggcctaccaagcccgcgttcagtagggggtctgaggggaaggtcctccacattggaactgcgacacggtccaaactcctacgggaggcagcagtgaggaatattggtcaatgggcgagagcctgaaccagccaagtagcgtgcaggacgaaggccctgtgggttgtaaaccgcttttacggggggataaagtgagagacgtgtcgttcattgcaggtaccgcacga

SEQ ID NO: 10092 - DNA, 490 bp, unidentified
  misc_feature 1..490: note = Ascusbbf_1371595, encodes 16S rRNA
  source 1..490: mol_type = genomic DNA
agagtttgatcctggctcaggatgaacgctagcggcaggcttaacacatgcaagtcgaggggtaacgcggggtagcaatactctggcgacgaccggcgcacgggtgcgtaacgcgtatgcaacctacctgtaacaggggtataacggagagaaatttccactaatcccccatattgttattctttcgcatgttaggataacgaaagcttcggtggttacggatgggcatgcgtgacattagctagttggtaaggtaacggcttaccaaggcgacgatgtctaggggagctgaaaggcgtatccccaacactggaactgggaaacggaccaaactactgcgggagggagcagtgaggaatattggtcagtggacgggagtctgaaccagccaagccgcgtgggggaagaaggtcctatgggttgtaaactgcttttgtgcgagagtaataagggctttgcgaagcccgatgagagtatcggacgaataagc

SEQ ID NO: 10093 - DNA, 490 bp, unidentified
  misc_feature 1..490: note = Ascusbbf_1371611, encodes 16S rRNA
  source 1..490: mol_type = genomic DNA
agagtttgatcctggctcaggataaacgctggcggcgcacataagacatgcaagtcgaacggacttaactcattcttaacgattgagagcggttagtggcggactggtgagtaatgtataagtaacctgcctttcagaggggaacaacagttggaaacgactgctaataccgcatattccacgagaatcacatgattcaagtgggaaaggagcaatccgctgatagatggacttatatctgattagcgagctggtggggtaacggcctaccaaggcgacgatcagtagccggactgagcggttgagcggcaccgttggggctgagctacggcccagactccgacgggaggcagcaggcgggaatgttgagcaatggagggcacgctgacgcagtgacgccgcgggcaggaagaaggttttcggattgtaaactgctttagacagggaagaaaaaagacagtacctgtagaataagctccggctaactacg

SEQ ID NO: 10094 - DNA, 490 bp, unidentified
  misc_feature 1..490: note = Ascusbbf_1371614, encodes 16S rRNA
  source 1..490: mol_type = genomic DNA
agagtttgatcatggctcaggatgaacgctagcgacaggcctaacacatgcaagtcgaggggcagcgcgggagaagcttgcttttcctggcggcgaccggcgcacgggtgcgtaacaggtgtgcaatctgtccatagtcggggaatagcccagcgaaagttggattaatgctccatgtgtcacgaagccgcatgactttgtgatgaaacgtaaggactatgggtgagcacgcttctgattagatagttggtgaggtaacggctcaccaagtcgacgatcagtaggggttctgagaggaaggtgccacgatgacggaatgagtaacgatgcaaagacctacgggaaggcgcagggagcaagagtggacaaggggcgagagcctgaaccagccaagtcgcgtgaaggaagaagggtctcgggagtgtaaactgcttttgtccgggagtaagaaaggccacgtgtcgcttcttgcaagtatcggacgaataag

SEQ ID NO: 10095 - DNA, 490 bp, unidentified
  misc_feature 1..490: note = Ascusbbf_1341205, encodes 16S rRNA
  source 1..490: mol_type = genomic DNA
agagtttgatcatggctcaggatgaacgctggcggcgtgcttaacacatgcaagtcgaacggagttatctcgctgaggatagcttgctcaaatcttgagataacttagtggcggacgggtgagtaacgcgtggataacctgccttataccgggggataacacttagaaataggtgctaataccgcataagcgcacgatcccgcatgggaaagtgtgcaaaactccggtggtataagatggatccgcgtctgattagatagttggtgaggtaacgccccaccaagtcaacgatcagtagccggcatgagagggcgaactgcgacattgggactgagaaacggcacaaaatcctacgggaggaagcaggggggaatagtgcaaaatgggggaaaccctgatgcagcgacgccgcgtgagtgaagaagtatttcggtatgtaaagctctatcagcaaggaagaaaaaaatgacggtacttgactaagaagcac

SEQ ID NO: 10096 - DNA, 490 bp, unidentified
  misc_feature 1..490: note = Ascusbbf_1321741, encodes 16S rRNA
  source 1..490: mol_type = genomic DNA
agagtttgatcctggctcaggatgaacgctggcggcgtgcttaacacatgcaagtcgaacggagttatctcgctgaggagagcttgctcaaatcttgagataacttagtggcggacgggtgagtaacgcgtggataacctgccttataccgggggataacactagaaataggtgctaataccgcataagcgcatcatcccgcatgggaaagtgtgaaacaccccggtggtcttagatggaatcgcgtcagcttaggtagttgggggggcaaaggcccaccaggtcaacgattagtagccggcctgagaggctgaacggccacattgggactgagacacggcccaaacgcctacgggaggcggcagtggggaatattgcacaatgggggaaacccggatgcagcgacgccgcgtgagtgaagaagtatttcggtatgtaaagctctatcagcaaggaagaaaaaaatgacggtacttgactaagaagcccc

SEQ ID NO: 10097 - DNA, 485 bp, unidentified
  misc_feature 1..485: note = Ascusbbf_1371566, encodes 16S rRNA
  source 1..485: mol_type = genomic DNA
agagtttgatcatggctcagaacgaacgctggcggcaggtcttaggcatgcaagtcgaacggacgacagagtggcttgccattctgaagttagtggcgcacgagtgagtaacgcgtgggaaactgcccttcactggggaataacgtctggaaacggacgctaataccgcatacgcccgccaggggaaagatttatcggtgatggatgttcccgcgttggattaccttgttggtggggtaatggcctaccaaggcgatgatccatagctggtctgagaggacgatcagccacgctggaactgaggaacggtccagagtcagacgggaggcagcagctaagagtatggggcaatggaggaaactctcaccaagccatgccgcgtgaatgaagaaggccttcggggtgtaaagttcttttagtcaggaagatgatgacagtagtgacagaaaaagcaccggctaacgtcgtgccagcagccgcgtaat

SEQ ID NO: 10098 - DNA, 490 bp, unidentified
  misc_feature 1..490: note = Ascusbbf_1436572, encodes 16S rRNA
  source 1..490: mol_type = genomic DNA
agagtttgatcctggctcaggatgaacgctagctacaggcttaacacatgcaagtcgaggggcagcataacgaaagcttgctgttgttgatggcgaccggcgcacgggtgagtaacgcgtatccaaccttccccttagtagggcatagcccggcgaaagtcggattaataccctatgttttccgttgatgacatctgaagtggcataaagatttatcgctaatggatgtggatgcgtctgattaggttgttggctgggtaacggcccaccaaaccatcgatcagtaggggttctgagaggaaggttccctcgaatggtactgagacacggaccaaactcctacgggaggcagcagtgaggaatattagtcgatgagcgagagcctgaaccagccaagtagcgtacaggatgacggccctatggggtgtaaactgcttttgcatgggaataaagtgagggacgtgtcccttcttgtatgtaccatgagaat

SEQ ID NO: 10099 - DNA, 490 bp, unidentified
  misc_feature 1..490: note = Ascusbbf_1341386, encodes 16S rRNA
  source 1..490: mol_type = genomic DNA
agagtttgatcctggctcaggataaacgctggcggcgcacataagacatgcaagtcgaacggacttaactcattcttcacgcttgatagcggttagtggcggactggtgagtaatgtataagtaacctgcctatcagatgggaacaacagtttgaaccgactgctaataccgcatatgccacgagaatcacatggttcaagtgggaaaggagcaatccgctgttagatgtacttatatcttattcgctagtttgtggggtaacggcctaccaaggcgacgatcagtagccggactgagagggtaaacggccacattgggactgcgatacggcccagactccgacgggaggaagcagtcgggaagattgcgcaatggaggaaactctgacgcagtgacgccgcgtgcaggaagaaggttttcggattgtaaactgctttagaaagggaagaaaaaagacagtacctgtagaataagctccggctaactacg

SEQ ID NO: 10100 - DNA, 490 bp, unidentified
  misc_feature 1..490: note = Ascusbbf_1341371, encodes 16S rRNA
  source 1..490: mol_type = genomic DNA
agagtttgatcatggctcaggataaacgctggcggcgcacataagacatgcaagtcgaacggacttaactcattcttaccgattgagagcggttagtagcggactggtgagtaatgtataagtaacctgcctatcagaggggaacaacagttggaaacgactgctaatcccgcatattccatgagaatcacttggttcaattgggaagggagcattccgctggtgtatgaccttttatcagattatctagttggtggggtaacggcctacaaaggatccgatcagtggccggacggaggggttaaccggccaaagtgggactgagatacggcccagactcctacgggaggaagcagtcgggaatattgcgcaatggaggaaactctgacgcagtgacgccgcgtgcaggaagaaggttttcggattgtaaactgctttagacagggaagaaaaaagacagtacctgtagaataagctccggctaactacg

SEQ ID NO: 10101 - DNA, 490 bp, unidentified
  misc_feature 1..490: note = Ascusbbf_1321721, encodes 16S rRNA
  source 1..490: mol_type = genomic DNA
agagtttgatcctggctcaggatgaacgctagcggcaggcttaacacatgcaagtcgaggggcagcgcggggtatcactactcttgctgctaccggcggacgggtgcgtaactcgtgcgcaacttgcccgtcactgggtgataggcactggcaacggtgtgtaatactccatcacatttggattcacatggctttatatttaaagattcgttgtttacggattggctcgcgtaacattatctagtcggcggtgtaccggcccaccgaggccacgatgtttagtggttctgagaggaaggtccccaaaacgggaactgggaaacggtccagaagcctacgggaggcagcagtgaggaatagtggtcaatgggcggaagcctgaaccagccatgcagcgtgaaggaataaggccctatgggtcgtaaactgcttttccttgagggcaataaggggcacgtgtggcccgatgagagtatcaggggaataagca

SEQ ID NO: 10102 - DNA, 488 bp, unidentified
  misc_feature 1..488: note = Ascusbbf_1436547, encodes 16S rRNA
  source 1..488: mol_type = genomic DNA
agagtttgatcatggctcagaacgaacgctggcggcaggcttaacacatgcaagtcgagcgggaattggagatagcttgctatcgaagaggagagcagcgcactggtgagtaacacgtgggaacataccttttggtgggggacaacagttggaaacgcctgctcataccgcataagccctgagggggaaagctttattgccgagtgattggtccgcggaagattaggtagttggtggggtaactgcctacctagccaacgatctatagctggtctgtgaggacgataagccaccttgggcgtgagacaccggcccgactcatacgggggggaagggggggggagattgggcaaggggggcaacgctggcccagccaagccgcgggagagaagaaggttttcggattgtaaagctctttcggacgtgaagatgatgacggtagcgtctaaagaagccccggctaacttcgtgccagcagccgcggtaat

SEQ ID NO: 10103 - DNA, 490 bp, unidentified
  misc_feature 1..490: note = Ascusbbf_1321713, encodes 16S rRNA
  source 1..490: mol_type = genomic DNA
agagtttgatcatggctcaggacgaacgctggcggcatgcttaacacatgcaagtcgaacggactgattccttcgggatgaaagttagtggcgaacgggtgaggaatgtatgagcaacctgcctctgtcaacgggataacagttggaaacgactgctaatacggtataagaccacggcaccgcatggtgctgcggtaaaagatttttcggacagagatgggcgcatatcccattagctagttggtgagataatagcccaccaaggcgacgaggggtagccgagctgaaaggcttatcggccacagtggaactgccacacggacgcgacacctacgagaggaagcagtggggagagtggggcaatggaggaagctctgagccagaaataccgcgtgagcgatgaaggtaattttattgtaaagatcttttctcaggaacgaataaagatgacggtacctgaggaataagcaccggctaactacgtgccagc

SEQ ID NO: 10104 - DNA, 490 bp, unidentified
  misc_feature 1..490: note = Ascusbbf_1341385, encodes 16S rRNA
  source 1..490: mol_type = genomic DNA
agagtttgatcctggctcaggataaacgctggcggcgcacataagacatgcaagtcgaacggtctcacctcattcttaacgattgagtgcggttagtgcccgactgcggagtactgtttcagtcaccttcttatcagaggggaacaacagttggaaacgactgctcatacctcttattccacgttcatctcattgttcaactgggaaaggagcaatcagctgatagctggccttacatcggattagttatttggtggggtcacggccgaccaaggcgacgatcagtagccggactgcgtggttaagaggcgacatagggactgagatacggccccgacgccgacgggaggcagcagtagggaagattgagcaatggaggaaactctgacgcagtgaggccgcgggcaggaagaaggttttcggattgtaaacagattgagaaagggaagaaaaaagacagtaccggtagaataagctccggctaactacg

SEQ ID NO: 10105 - DNA, 490 bp, unidentified
  misc_feature 1..490: note = Ascusbbf_1436477, encodes 16S rRNA
  source 1..490: mol_type = genomic DNA
agagtttgatcatggctcaggataaacgctggcggcgcacataagacatgcaagtcgaacggacttaactcattcttaacgattgagagcggttagtggcggcctggtgagtaatgtataagtaacctgcctctcagaggggaccaacagttggaaacgactgctaataccgcatatgccacgagaatcacatggttcacgtgggaaaggggcaatccgctgatagatggacttatagctgattagctagttggtggggtaacgccctaccaacgcgacgatcagtagccggactgagaggttaaacggcgacatagagactgagagacggcacagactccgacgagaggcagcaggcgggaagattgcgcaatggaggaaactctgacgcagtgacgccgcgggcaggaagaaggttttcggattgtaaactgctttagacagggaagaaaaaagacagtacctgtagaataagctccggctaactacg

SEQ ID NO: 10106 - DNA, 490 bp, unidentified
  misc_feature 1..490: note = Ascusbbf_1371413, encodes 16S rRNA
  source 1..490: mol_type = genomic DNA
agagtttgatcctggctcaggacgaacgctggcggcgcgcttaacacatgcaagtcgaacggtgaacagcggaaagcttgcttttagctgttcatagtggcgtacgggtgagtaacgcgtgaggacttgtcctgtacagggggacaactgatggaaacgtcagctaataccccacgagccgcgaggaaaaaggagcgatccggtacatgagagtctcgcgttctagcggttagttggtgaggtaacggcccaccaaggcgaatgcggagagccggactgagaggttggccggccacattggaactgagagacggtccagactcctgcgggaggcagcagtggggaatattgggcaatgggggaaagcctgacccagcgacgccgcgtgagtgaagaaatccctcgggatgtaaagctctgttgtgcgggaagaaggaagtgacggtaccgcacgaggaagccacggcaaactacgtgccagcagccgcgg

SEQ ID NO: 10107 - DNA, 490 bp, unidentified
  misc_feature 1..490: note = Ascusbbf_1341265, encodes 16S rRNA
  source 1..490: mol_type = genomic DNA
agagtttgatcctggctcaggataaacgctgacggcgcacataagacatgcaagtcgaacggacttaactcattcttaacgactgagagcggttagtggcggactggtgattaatgtataagtaacctgcctatcagaggggaacaacagttggaaacgacatctaataccgcatatgccacgagaatcacatggttcacgtgggacaggagcatgtcgctgatagtcggacttatatctgattagctaattgttggggtaacgccctcccaaggcgacgatcagtatccgtactgagaggtaaaacgacaaaattgggactgggagacggcccaggggcgtacgggaggcagcggacgggaagattgcgcaatggaggaaacgctgaggaagtgacgccgcgggcaagaagaaggttatcggattgtaaactgctttagacagggaagaaaaaagacagtacctgtagaataagctccggctaactacg

SEQ ID NO: 10108 - DNA, 490 bp, unidentified
  misc_feature 1..490: note = Ascusbbf_1436504, encodes 16S rRNA
  source 1..490: mol_type = genomic DNA
agagtttgatcatggctcaggatgaacgctagcggcaggcttaacacatgcaagtcgaggggcagcgcgggctagcaatactctggtggcgaccggcggaagggtgcgtaactcgtgcgcaacttgcccgccacttggggataggtactcggaacggtgtgtaatactccataacatatggtttcacatggcttcaaagtgaaagattcggtgttgacggatgggctcgggtaacattagctagtcgtcgtggtaacgtcacaccgagccaacgatgtgtaggggtgctgagaggaaggtcacccacactggaactgagacacggtccagactcctacgggaggcagcagtgaggaatattggtcaatggacggaagcctgaaccagccatgtagcgtgcaggaagacggccctatgggtcgtaaactgcttttccttgggggtaataagggtcacgtgtggccggatgagggtaccagaggaataagca

SEQ ID NO: 10109 - DNA, 490 bp, unidentified
  misc_feature 1..490: note = Ascusbbf_1341254, encodes 16S rRNA
  source 1..490: mol_type = genomic DNA
agagtttgatcctggctcaggatgaacgctagctacaggcttaacacatgcaagtcgaggggcagcatgaatcaagcttgctttgtttgacggcgaccggcgcacgggtgagtaacgcgtgtccgaccttccctttagtcgagaatagcccggcgaaaatcggattaatgctcgatgttattccaagctcgcatcttagtcggatcaaaggtttatcgctataggatggggacgcgtctgattaggttgtcggcggggtaacggcccaccaaggccacgatcagtaggggttctgagaggacggtcccccacattggaactgagacacggtccagactcctacgggaggcagcagtgaggaatattggtcaatggccgagagtctgaaccagccaagtagcgtgaaggatgactgccctatgggttgtaaactgcttttgtacagggataaagtcgtcgacgtgtggcccgctgcatgtaccgtacgaat

SEQ ID NO: 10110 - DNA, 490 bp, unidentified
  misc_feature 1..490: note = Ascusbbf_1321686, encodes 16S rRNA
  source 1..490: mol_type = genomic DNA
agagtttgatcctggctcaggatgaacgctagctacaggcttaacacatgcaagtcgaggggcatcatgtatctggcttgccatgtttgatggcgaccggcgcacgggtgcgtaatgcgtgttcgaccttccctttactcgagaatagcccatcgaaagatggattaatgccctatgttctccctttatcgcatgttattcggagcaaagatttatcgctagaggatggggacgcgtctgattagcttggcggcggggtaacggcccaccgtgcccacgatcagtaggggttctgagaggaaggtcccccacattggaactgagacacggtccagactcatacgggaggcagcagtgaggaatattggtcaatggacgagagtctgaaccagccaagtagcgtgaaggatgacggccctatgggttgtaaactgcttttgtacggggataaagtggggcacgtgtggtcggctgcaggtactgtacgaat

SEQ ID NO: 10111 - DNA, 490 bp, unidentified
  misc_feature 1..490: note = Ascusbbf_1321691, encodes 16S rRNA
  source 1..490: mol_type = genomic DNA
agagtttgatcatggctcaggatgaacgctagcgataggcctaacacatgcaagtcgaggggcagcacatgaagtagctatacggatggtggcgaccggcgcacgggtgagtaacgcgtatgcaacctgcctacaacaggggaataacccgttgaaagacggactaataccccataacacagggatcccgcctgggaatatttgttaaagatttatcggttgtagatgggcatgcgttccattagcttgttggcggggtaacggcccaccaaggcaacgatggataggggatctgagagggtgatccccaacactggtactgagacacggaccagactcctacgggaggcagcagtgaggaatattggtcaatggacgcaagtctgaaccagccacgtcgcgtgaaggaagacggccctacgggttgtaaactgcttttgtgaggggataaagtgtagtacgtgtactattttgcatgtaccttacgaat

SEQ ID NO: 10112 - DNA, 490 bp, unidentified
  misc_feature 1..490: note = Ascusbbf_1436192, encodes 16S rRNA
  source 1..490: mol_type = genomic DNA
agagtttgatcatggctcaggatgaacgctagcgataggcctaacacatgcaagtcgaggggcagcacatgaagtagcaatacggatggtggcggccggcccccgggggagtaacgcgtttgcaacctgcctacaacaggggaataacccgttgaaagacggactaataccccataacacagggatcccgcatgggaatatttgttaaagatttatcggttgtggatgggcatgcgttcaattagcttgttggtggggtaacggctcaccaagccaacgatggataggggaactgagaggtagatcccccacacaggtactgagaaacggaccaaactcctacgggaggcagaagtgaggaatattggtcaatggacgcaagtctgaaccagccaagccgcgtgaaggaagactgccctacgggttgtaaactgcttttgtaagggaataaagtgtagtacgtgtactgttttgcatgtaccgtacgaat

SEQ ID NO: 10113 - DNA, 486 bp, unidentified
  misc_feature 1..486: note = Ascusbbf_1321666, encodes 16S rRNA
  source 1..486: mol_type = genomic DNA
agagtttgatcctggctcagaacgaacgctggcggcaggtcttaggcatgcaagtcgaacggacgacagagtggcttgccattcttcagttagtggcgcacgagtgagtaacgcgtgggaaactgcccttcactggggaataacgtctggacacggacgctaataccgcatacgccctcaagggtaaagatttctcggtgattgctgtgcccgctttggattgcctttttggtggggtaatggcataccacggcgctgatccatagctggtctgagaggacgaacagccacgctggaactgaggcacggtccagactcctacgggaggcagcagctaagaatattgggcaatggaggaaactctgacccagccatgccgcgtgaatgaagaaggccttcgggttgtaaagtgcggggagtcatgaagatgatgacagtagtgacagaaaaagcaccggctaacttcgtgccagcagccgcggtaat

SEQ ID NO: 10114 - DNA, 472 bp, unidentified
  misc_feature 1..472: note = Ascusbbf_1371394, encodes 16S rRNA
  source 1..472: mol_type = genomic DNA
agagtttgatcctggctcagagcgaacgctggcggcatgcttaacacatgcaagtcgcacgaagggttcggccttagtggcggacgggtgaggaacgcggaggaatctatccatgggtgggggagaactctgggaaactggagcgaataccgcatgatacctgagggtcaaaggcgcaagtcgcctgtggaggagcctgcgttggatgagcttgttgggggggtaatggcctaccaaggcgatgatcgatagctggtcggagaggaggatcagccacactgggacggagacacggcccagactcctccgggcggcagccgtggggactcttggcccctgggggcaaccctgctccagccctgccgcgtgtgtgaagacggttttcggattgtaaagcactttcggcggggacgatgatgaccgtacccgcagacgacgccccggctaccttcgtgccagcagccgcggtaat

SEQ ID NO: 10115 - DNA, 486 bp, unidentified
  misc_feature 1..486: note = Ascusbbf_1436507, encodes 16S rRNA
  source 1..486: mol_type = genomic DNA
agagtttgatcctggctcagaacgaacgctggcggcaggtcttaggcatgcaagtcgaacggacgacagagtggcttgccattctgaagttagtggcgcacgagtgagtaacgcgtgggaaactgcccttcactggggaataacgtctggaaacggacgctaataccgcatacgccctcaaggggaaagatttatcggtgatggatgttgccgcgttgcattagcttgttggtgggataatgggcaaacgaggtgatgagccatatctgttatgagaggacgctcagccacgctggaactgatacacggtccagactccgacgggaggcagcagctaagaatattgggaaatggaggaaactctgaccaagccatgccgcgtgaatgaagaaggccgtcgggttgtaaagttcttttagtcatgaagatgatgacagtagtgacagaaaaagcaccggctaacttcgtgccagcagccgcggtaat

SEQ ID NO: 10116 - DNA, 490 bp, unidentified
  misc_feature 1..490: note = Ascusbbf_1321647, encodes 16S rRNA
  source 1..490: mol_type = genomic DNA
agagtttgatcatggctcaggatgaacgctagcggcaggcttaacacatgcaagtcgaggggtaacgcggggtagcaataccctggcgacgaccggcgcacgggtgcgtaacgcgtatgcaacctacctgtcacagggggataacggagagaaatttccactaataccccatattgttcttctttcgcatgctaggctaacgaaagctacggtggttacggatgggcatgcgtgatattagctagttggtaaggtaacggcctcccaaggcgacgatgtctaggggagctgagaggcagatcccccacactggaactgagaaacggtcaagactcctacgggaggaagcagtgaggaatattggtcaatggacggaagcctgaaccagccaagccgcgtggaggatgaaggtcctatgggttgtaaactgcttttgtacgggggtaatatgggcgtcgcgaagccctatgtgggtatcggacgaataagg

SEQ ID NO: 10117 - DNA, 472 bp, unidentified
  misc_feature 1..472: note = Ascusbbf_1321641, encodes 16S rRNA
  source 1..472: mol_type = genomic DNA
agagtttgatcctggctcagagcgaacgctggcggcatgcttaacacatgcaagtcgcacgaaggggtcggcctgagtggcggacgggggagtaacgcggaggaagctatccaggggtgggggagaactctgggaaactggagcgaagaccgcatgatacctgagggtcaaaggcgcaagtcgcctgtggaggagcctgcgtccgattagcttgttggtggggtaatggcctaccaaggcgatgatcgatagctggtctgagaggaggatcagccacactgggacggagacacggcccagactcctccgggcggcagccgtggggactcttggcccctggcggccaccctgctcccgccctgccgcgtgtgtgacgacggttttcggattgtacagcactttcggcggggacgatgatgaccgtacccgcagaagacgccccggctaacttcgtgccagcagccgcggtaat

SEQ ID NO: 10118 - DNA, 490 bp, unidentified
  misc_feature 1..490: note = Ascusbbf_1316140, encodes 16S rRNA
  source 1..490: mol_type = genomic DNA
agagtttgatcctggctcaggatgaacgctggcggcgtgcctaacacatgcaagtcgaacggggatattccgccgtttgaagcttcggcagaaaacatgggatatcttagtggcgaacgggtgagtaacgcgtgggcaacctgccccgtaccgggggatagcagttggaaacgactgataataccgcataagcgcacagcacggcatcgtgcagtgtgaaaaactccggtggtacgggatgggcccgcgtctgattagctagttggcggggtaacggcccaccaaagcgacgatcagtagccggcctgagagggcggacggccacattgggactgagacacggcccagactcctacgggaggcagcagtggggaatattgcacaatgggggaaaccctgatgcagcgacgccgcgtgagggatgaaggccttcgggttgtaaactcctttcgctagggacgaagatgtattttgacggtacctggagaag

SEQ ID NO: 10119 - DNA, 486 bp, unidentified
  misc_feature 1..486: note = Ascusbbf_1321847, encodes 16S rRNA
  source 1..486: mol_type = genomic DNA
agagtttgatcctggctcagaacgaacgctggcggcaggtcttaggcatgcaagtcgaacggacgacagagtggcttgcccttcttaagttagtggcgcacgagtgcgtaacgcgtgggaaactgcccttcactggggaataacgtctggaaacggacgttaataccgcctccgcccgcaaggggccagatttatcggtggtggatgtgcccgcgttggattagcttgttggtggggtaatggactcccacggcgatgatccatagctggtctgagaggacgatcagcaacgctggaacttagacacggtccagactcctacgtgaggcagcagctaagaagattgggcaatggaggaaactctgacccagacatgccgcgtgaaggaagaaggccttcgggttgtaaagttcttttagtcatgaagatgatgacagtagtgacagaaaaagcaccggctaacttcgtgccagcagccgcggtaat

SEQ ID NO: 10120 - DNA, 490 bp, unidentified
  misc_feature 1..490: note = Ascusbbf_1371895, encodes 16S rRNA
  source 1..490: mol_type = genomic DNA
agagtttgatcatggctcaggacgaacgctggcggcgtgcttcatacatgcaagtcgaacggggtccattcagtggcaacactgaggaagatctagtggcgaacgggtgagtaacacgtgaggaacctatcccggtctctggaataacaagtggaaacatttgctaataccgtatgccgtcgtctgcttgaatgaagaagtgacgaaagattcacccgattgggcgggcctcgcgacctatcagtttgttggtggggtagtggcataccaagtcatagacgagtagctggtctgacagagtgacagacccaactcggcctgagacacggcccagactcctacgggaggcagcagtagggaatctagcgaaatcggcgcaagaccgacgcagcaacgccgcgtgcgggaagaaggctcacgggttgtaaaccgctatcagtaggaacgaatttgacggtacctgcagaagaaggtgcgtccaacaacgtgc

SEQ ID NO: 10121 - DNA, 490 bp, unidentified
  misc_feature 1..490: note = Ascusbbf_1321842, encodes 16S rRNA
  source 1..490: mol_type = genomic DNA
agagtttgatcatggctcaggatgaaagagggcggagtgcagaaaaaaggaaaggagagcgagaatttgtggaagtttaccttcggggaaacggaagcgaaggacagaggaggacggttgaggtacgcgtatggaagctgcccttcacacggtgagagagagagtaaagggggagtaagagacgagagtacggaccagcacatggtgatccggggaaagctttatcggtgaaggaggaacctgcgtctgattagctagttggtgaggtaatgccgcaacaaggcaatgatcagtagccgagctaagagggggaccctcccaactgggactgagcaacggcaccccctcctacgggcggcagcagtgggggatattgcgcaatgggcgaaagcctgacgcagcaacgccgcgtgaacgagtacgctcttcgtagtgtaaagttctgtcctatgcgaagaagatgacggtaccataggaggaagccccggct

SEQ ID NO: 10122 - DNA, 490 bp, unidentified
  misc_feature 1..490: note = Ascusbbf_1436050, encodes 16S rRNA
  source 1..490: mol_type = genomic DNA
agagtttgatcctggctcaggatgaacgctagcggcaggcttaacacatgcaagtcgaggggcagcgcggggtagcactcctctgtcggcgcccgtcggaggggtgcgtaacgcgtgagcaacttgcccttcactgggggataggcactggaaacggtgtgtaatactccataacatatggattcacatggattcatattgaaagattcgttggtgacggatgcgctcgcgtaacattagctagtcggcggggtaacggcccaccgaggctacgatgtttaggggttctgagaggcaggtcccacacaatggaactgagaaacggtccagactcctacggaaggcagcagtgaggaatattggtcaatgggcggaagcctgagccagccaggccgcgtgaaggaataaggcccgatgggtcgtaaactgcttttccaggagggcaataagggtaacgtgtggcccgatgagagtagcaggggaataagca

SEQ ID NO: 10123 - DNA, 490 bp, unidentified
  misc_feature 1..490: note = Ascusbbf_1343677, encodes 16S rRNA
  source 1..490: mol_type = genomic DNA
agagtttgatcctggctcaggatgaacgctagcggcaggcttaacacatgcaagtcgaggggtaacgcggggtagccatactctggcgacgaccggcgcacgggtgcgtaacgcgtatgcaacctacctgtcacaggggtataacggagagaaatttccactaatcccccatattgttagagattcgcatgtttctctaacgaaagcttcggtggttacggatcggcatgcgtgacattagctagttggtaagctaacggcataccaacgcaacgatgactaggggagctggagggcttatcccccaaaatgggacggagacacggaccagactcgtacgggaggaagcagtgaggaatattgatcaatggacggaagtcggaaccagccatgccgcgtgaaggatgaaggtgctatggattgtaaacttcttttgtcggagggtaaaaaaggccacgtgtggcttcttgaaagtatcggacgaataagc

SEQ ID NO: 10124 - DNA, 490 bp, unidentified
  misc_feature 1..490: note = Ascusbbf_1371912, encodes 16S rRNA
  source 1..490: mol_type = genomic DNA
agagtttgatcatggctcaggatgaacgctggcggcgcgcctaacacatgcaagtcgaacggttaaggcgccttcgtgcgcctataccgtggcgaacggctgagtaacacgtgggcaacctgcccctcgcacctttacagcctcgggaaaccgtggatgatcccggatcctccgcctcccccgcatggggaggccgggacagcccgcacggcgagggatggacccgccccctgttatctagttgcctgggcagcggcccaccaacgcgatgatgggtagctgggttgagagaccgaccggcccgagtgggagcgagaaacggcccagactcctacgggaggaagcagtggggaatcttgcacaatgggcggaagccggatgcagcgacgccgcgtgcgggacgaaggccttcgggctggaaaccgctttcagcagggacgaggcgaaagtgacggtacctgcagaagaagccccggctaactacgtgcca

SEQ ID NO: 10125 - DNA, 485 bp, unidentified
  misc_feature 1..485: note = Ascusbbf_1372081, encodes 16S rRNA
  source 1..485: mol_type = genomic DNA
agagttgatcatggctcagaacgaacgctggcggcaggtcttaggcatgcaagtcgaacggacgacagagaggcttgccattctgaagttagtggcgcacgagtgagtaacgcgtgggaaactgcccttcactggggaataacgtctggaaacggacgctaataccgcatacgcccgcaaggggaaagatttatcggtgatggatgtgcccgcgttggattagcttgttggtggggtaatggcctaccaaggcgatgatccatagctggtctgagaggacgatcagccacgctggaactgaggaaaggttccgacttcttacggggggaggaggtaaggataatgggccatggagggaactccgaaccaggcatggcgcgggaaagaagaagggccttggggtggtaaggttttttagtcatgaagatgatgacagtagtgacagaaaaagcaccggctaacttcgtgccagcagccgcggtaat

SEQ ID NO: 10126 - DNA, 490 bp, unidentified
  misc_feature 1..490: note = Ascusbbf_1343582, encodes 16S rRNA
  source 1..490: mol_type = genomic DNA
agagtttgatcctggctcaggatgaacgctagcggcaggcttaacacatgcaagtcgaggggcagcgcggggtagcaatcctctggcggcgaccggcagaagggtgcgtaacgcgtgagcaacttgcccgtcactgggggataggcactggaaacggtgtgtaatactccattacatatggattcacatggttttatattgaaagattcgttggtgacagatgggctcgcgtaacattagcgagtcggcggggtaacggcccaccgagcctacgatgtttaggggttctgagaggaaggtcacacaacatggaactgagacacggtccagactcgtacgggaggcagcagtgaggaatattggtcaatgggcggaagcctgaaccagccatgccgcgtgcaggaagaaggcccgatgggtcgtaaactgcttttccttgagggcaataagggtcacgtgtggcccgatgagagtagcaggggaataagca

SEQ ID NO: 10127 - DNA, 486 bp, unidentified
  misc_feature 1..486: note = Ascusbbf_1372095, encodes 16S rRNA
  source 1..486: mol_type = genomic DNA
agagtttgatcctggctcagaacgaacgccggcggcaggtcttatgcatgcaagtcgaacggacgacagagtggcttgccattctgatgttagtggcgcacgagtgagtaacgcgtgggtaactgcccttcactggggaataacgtctggatacggacgctaataccgcatacgcccgcaaggggaaagatttatcggtaatggatgtgcctgcgttggattagcttgttggtgtggtaatggcctaccatggctatgacccatagctggtctgagaggaagatcagccacgctggaattgagacacggaccagactcctacggggggcagcagctaagaatagtgggcaatggaggaaactctgacccagccatgccgcgtgaatgaagaaggccttcggggtgtaaagttcttttagtcatgaagatgatgacagtagtgacagaaaaagcaccggctaactgcgtgccagcagccgcggtaat

SEQ ID NO: 10128 - DNA, 490 bp, unidentified
  misc_feature 1..490: note = Ascusbbf_1323134, encodes 16S rRNA
  source 1..490: mol_type = genomic DNA
agagtttgatcctggctcaggatgaacgctggcggcgtgcctaatacatgcaagtcgagcgagaaatctttcagacgattcttcgtatgagtcaggaagatggaaagcggcggacgggtgagtaacgcgtaggcaacctgccctcagcagagggatagccattggaaacgatgattaaaacctcataatgctgcagtaacacatgttacagcagccaaagattcatcggctggggatgggcctgcgtctgattaaccggttggtgaggtaacggttcaccaaggtaacgatcagtagccgaccttggaggggaaacgcgcacataggaactgagacacggtgcaaacttctacggaaggcagcagtaaggaatcttgcacaatgggggaaaccctgatgaagcaacgccgcgtgaacgatgaaggccttagggttgtaaagttctgatctgtgggaagaagaaagtgacggtaccacaggagaaagcccc

SEQ ID NO: 10129 - DNA, 165 bp, unidentified
  misc_feature 1..165: note = Ascusbbf_1385670, encodes 16S rRNA
  source 1..165: mol_type = genomic DNA
agagtttgatcatggctcagacatatcgaaacgaatcattgaatcttcagaaccgaatagttcaaaggctaattgtttcgctaactcagttttacctacaccagttggccctacaaataggaacgaaccgattggacgatttttagggccagcagccgcggtaat

SEQ ID NO: 10130 - DNA, 490 bp, unidentified
  misc_feature 1..490: note = Ascusbbf_993699, encodes 16S rRNA
  source 1..490: mol_type = genomic DNA
agagtttgatcatggctcaggatgaacgctggcggcgcatttaagacatgcaagtcgaacgaaaatttatgcttaaagagttgattagtttactaagatacaatttattataaattttagtggcggactggtgagtaatacataggtaatctaccttttagaggggggataactagaagaaattctagctaataccgcgtaagaccacatctaggcatctagaagaggtcaaagaagtaattcgctaaaagatgagcctgtggctgattagttagttggtggggcaatggcctaccaagacgatgatcagtagccggactgagaggttgaacggccacattgggactgagataaggcccagacccctacgggaggcagcagtgaggaatattggtcaatggtcgggagactgaaccagccaagtagcgtgcaggacgacggccctacgggttgtaaactgcttttatgcggggataaaggacgccacgtg

SEQ ID NO: 10131 - DNA, 490 bp, unidentified
  misc_feature 1..490: note = Ascusbbf_1322285, encodes 16S rRNA
  source 1..490: mol_type = genomic DNA
agagtttgatcctggctcaggatgaacgctagcggcaggcttaacacatgcaagtcgaggggcagcgcggggtagtaatactctggcggcgaccggcggacgggtgcgtaacgcgtgagcaacttgcccgtcactgggggataggcactggaaacggtgtgtaatactccataacatatggattcacatggattcatatttaaagattcgttggtgacggatgggctcgcgtaacattagctagtcggcgtggtaacggcccaccgaggctacgatgtttaggggttctgagaggaaggtgcgccataagggaactgagaaacggtccggcatcctacgggaggcagcagtgaggaataatggtcaatgggcgaaagcctgaaccagccatgcagcgtgcaggaataaggccctatgggtcgtaaactgcttttccttgagggcaataagggtcacgtgtggcccaatgagagtatcaggggaataagca

SEQ ID NO: 10132 - DNA, 490 bp, unidentified
  misc_feature 1..490: note = Ascusbbf_1324531, encodes 16S rRNA
  source 1..490: mol_type = genomic DNA
agagtttgatcctggctcaggatgaacgctggcggcgtgcttaacacatgcaagtcgaacggagttatctcgctgattcgatctttctcaaatcttgagataacttcgtgtcggacgtgtgcgtaacgcttgtataacctgccttctaccgggggataacacttataactagttgctactaccgcataagcgcccgatcccgcatgggaaagtgtgaaaaactccgatggtataaaatggagccgcgtctgattagttagttggtgaggtaacggcccaccaagtcaacgatcagtagccggactgagagggtgacaggcaacattgggactgggacacggcccaaacgcatacgggaggcaggagtggggaatagtgcacaatgggggaaacccggaagcagcgacgccgggggggtgaagaagtatgtcggtatggaaagcaagatcagaaaggaagaaaaaaatgacggtactggactaagaagccc

SEQ ID NO: 10133 - DNA, 490 bp, unidentified
  misc_feature 1..490: note = Ascusbbf_1342537, encodes 16S rRNA
  source 1..490: mol_type = genomic DNA
agagtttgatcatggctcaggatgaacgctggcggcgtgcttaacacatgcaagtcgaacggagttatctcgctgaggctatcttgctcaaatcttgagataactttgtggcggacgggtgagtcacgcgtggatcacctgccttatactgggggataacacttagaaataggtgctaataccgcataagcgcacgttcccgcatgggaaagtgtgaaaaactccggtggtgtaaagtggatccgcgtctgattagatagttggtgaggtaacggcccaccaagtcaacgctcagtagccgacctgagagggggaacggccacatcgggactgagacacggcccaaacaccgacgggaggcagcagtggggaagagtgcacaatgggggaaaacctgaggcagcgacgacgcgggggtgaagaaggagttcggtaggtaaagctcgatcagcaaggaagaaaaaaatgacggtacttgactaagaagccc

SEQ ID NO: 10134 - DNA, 486 bp, unidentified
  misc_feature 1..486: note = Ascusbbf_1342552, encodes 16S rRNA
  source 1..486: mol_type = genomic DNA
agagtttgatcatggctcagaacgaacgctggcggcaggtcttaggcatgcaagtcgaacggacgacagagtggcttgccattctgaagttagtggcgcacgcgtgagtaacgcgtgggaaactgcccttcactggggaataacgtctggaaacggacgctaataccgcatacgcccgcaaggggaaagatttatcggtgatggatgtgcccgcgttgggttggcttgtggttgggttaagggcttaccaaggtgatgatccatcgctggtctgagaggacgatgagccacgcgggaacggagacacggtccagactcctacgggaggcagcagcacagaatattgggcaagggaggaaactctgacccagccaggccgcgtgaatgaagaaggccttcgggttgtaaagttcttttagtcatgaagatgatgacagtagtgacagaaaaagcaccggctaacttcgtgccagcagccgcggtaat

SEQ ID NO: 10135 - DNA, 490 bp, unidentified
  misc_feature 1..490: note = Ascusbbf_1372426, encodes 16S rRNA
  source 1..490: mol_type = genomic DNA
agagtttgatcctggctcaggataaacgctggcggcgcacataagacatgccagtcgaacggacttaactcattcttaacgattgagagcggttagtggcggactggtgagtaatgtataagtaacctgcctatcagaggggaacaacagttggaaacgactgctaataccgcatatgccacgagaatcacatggttcaagtgggaaaggagcaatccgctgatagatggacttatatctgattagctggttgtttgggtaacgtcctaccacggcgacgaccagtagccggactggaaggttacccggccacatgtggactgggatacggcccagactccgacgggcggcagcagtcgggaagattgcgcaatggaggaacctctgacgcagtgacgccgcgtgcaggaagaaggttttcggattgtaaactgctttagacagggaagaaaaaagacagtacctgtagaataagctccggctaactacg

SEQ ID NO: 10136 - DNA, 490 bp, unidentified
  misc_feature 1..490: note = Ascusbbf_1372427, encodes 16S rRNA
  source 1..490: mol_type = genomic DNA
agagtttgatcctggctcaggatgaacgctagcggcaggcttaacacatgcaagtcgaggggtaacgcggggtagcaatactctggcgacgaccggcgcacgggtgcgtaacgcgtatgcaacctacctgtaacaggggtataacggagagaaatttccactaatcccccatattgttattctttcgcatgttaggataacgaaagcttcggtggttacggttgggcatgcgtgactttagctagttggtaaggtaacggcttaccaaggcgacgatgtctaggggagctgagaggcttatcccccacacaggtacagggaacaggaccaaactcctaagggaggcaggagggagcaatattggtcaatggacggaagtctgaaccagccatgccgagtggaggaagaaggacctatgggttgtaaactcctttcgttcgggggtaataagggctttgcgaagcccgatgagagtagcggacgaataagc

SEQ ID NO: 10137 - DNA, 490 bp, unidentified
  misc_feature 1..490: note = Ascusbbf_1435519, encodes 16S rRNA
  source 1..490: mol_type = genomic DNA
agagggggagaagggcggaggaggaaagagagagagaggaggaaaaaaggaaaggagaggggaaggaggaattaggagtaaacagatagaaagaaaaaagagaaaaagaaagaaaaaaataaccacccttccctatagtaaaggatagcccggcgaaagtcggattaatactctatgttattcaatgcggacatctaagttgaatcaaagatttatcgctataggatggggatgcgtctgattaggttgttggcggggtaacggcccaccaagcctacgatcagtaggggttctgagaggaaggtctcccacattggaactgagacacggtccaaactcctacgggaggcagcagtgaggaatattggtcaatgggcgagagcctgaaccagccaagtagcgtgcaggatgacggccctatgggttgtaaactgcttttatacggggataaagtgagggacgtgtcccttattgtaggtaccgtatgaat

SEQ ID NO: 10138 - DNA, 490 bp, unidentified
  misc_feature 1..490: note = Ascusbbf_1435542, encodes 16S rRNA
  source 1..490: mol_type = genomic DNA
agagtttgatcctggctcaggatgaacgctagctacaggcttaacacatgcaagtcgaggggcagcataacgaaagcttgcttttgttgatggcgaccggcgcacgggtgagtaacgcgtatccaaccttccccttagtagggcatagcccggcgaaagtcggattaataccctattttttccgtttaggacatctgaagtggaataaagatttatcgctaagggatgggaatgcgtcgaattaggttgttggcggtgtaacggcccaccacgccatcgctcagtaggggttctgagaggaaggtccgcaaccgtggaactggaaaaaggaacaaaatacgacgggaggcagcagtgaggaagattggtcaatgggcgagagcctgaaccagccaagtagcgtgcaggatgacggccctatgggttgtaaactgcttttgcatgggaataaagtgagggacgtgtccctttttgtatgtaccatgagaat

SEQ ID NO: 10139 - DNA, 490 bp, unidentified
  misc_feature 1..490: note = Ascusbbf_1342219, encodes 16S rRNA
  source 1..490: mol_type = genomic DNA
agagtttgatcctggctcaggctgaacgctagcggcaggcttaacacatgcaagtcgaggggtaacgcggggtagcaatactctggcgacgaccggctcacgggtgcgtaacgcgtatgcaacctacctgtaacaggggtataacggagagaaatttccactaatcccccatattgttagagattcgcatgtttctctaacgaaagcttcggtggttacggatggtcatgcgtgacattagctagttggtacggtaacggcttaccaaggcgacgatgtctaggggagctgagaggcttatccccacagctggtacgacgacacgaaccagactcctacgagaggcagcagtgcggactattggtcaatggacggaagtctgaaccagctatgccgcgtggaggaagaaggtcctatgggttgtaaactccttttgttcgagagtaataagaggcttgcgagcctcgatgagagtagcggacgaataagc

SEQ ID NO: 10140 - DNA, 490 bp, unidentified
  misc_feature 1..490: note = Ascusbbf_1324613, encodes 16S rRNA
  source 1..490: mol_type = genomic DNA
agagtttgatcctggctcaggatgaacgctggcggcgtgcctaacacatgcaagtcgaacgattaaaccgccttcgggcggatataaagtggcgaacgggtgagtaacacgtgaccaacctaccccgcacatcgggacagccctccgaaagggggattaataccgaatactccgtatttttcgcatgattaatacgggaaacctcttgcggggctggatggggtcgcggcgcattaggtaggagtcgggtcatcggcccgtctagcccaagacgggtagccgggttgagagaccgagcggccacattgggactgagagacggcccagactcctacgggaggcagcagtggggaatattgcgcaatgggggcaaccctgacgcggcaacgccgcgtgcgggaggaaggcattcgtgtcgtaaaccgctttcagcagggaagacatcgacggtacctgcggaagaagcaccggctaactacgtgccagcacc

SEQ ID NO: 10141 - DNA, 490 bp, unidentified
  misc_feature 1..490: note = Ascusbbf_1435567, encodes 16S rRNA
  source 1..490: mol_type = genomic DNA
agagtttgatcatggctcaggatgaacgctagctacaggcttaacacatgcaagtcgcggggcatcatggcatgtagcaatacatgctgatggcgaccggcggatgggtgagtaacgcgtatccaacctggccctatctcgggtacagcccctcgaaagggggataaattcccgatgttccctgggatccgcatgttttcccggccaaaggcatttgtcggatggggagggggatgggttccattaggcatgcgcggggttaccgaccccccgaccctaggatgtttaggggttcggagggaaaggtcccccacacgggaattaagacacgggccagactcctacgggaggcagcagtgaggaatattggtcaatgggcggaagcctgaaccagccatgccgcgtgcaggaataaggccctatgggtcgtaaactgcttttccttgagggcaataagggtcacgagtggcccgatgagagtatcagggga

SEQ ID NO: 10142 - DNA, 490 bp, unidentified
  misc_feature 1..490: note = Ascusbbf_1435266, encodes 16S rRNA
  source 1..490: mol_type = genomic DNA
agagtttgatcctggctcagattgaacgctggcggcaggcctaatacatgcaagtcaacgggaacagggaggaagcttggtttctcttctgacggggggggggagggggaggaagggctgggaaaatgcctggtagagggggacaacaggtggaaacggctgctaataccgcataatacctgagggttaaaaacgacaggcggtatcagatggcgccaggttggattagctatgaggtgaggtaaaggcccacctaagcgatggactctagctggtctgagagggtgatcagccacattgggactgagacacggcccagactcctacgggaggcagcagtagggaatattgcacaatggggggaaccctgatgcagccatgccgcgtgtgtgaagaaggccttcgggttgtaaagcactttcacaggggaggaaggatgacgttaccctgagaagaagcaccggctaactccgtgccagcagccgcggta

SEQ ID NO: 10143 - DNA, 490 bp, unidentified
  misc_feature 1..490: note = Ascusbbf_1372709, encodes 16S rRNA
  source 1..490: mol_type = genomic DNA
agagtttgatcatggctcaggacgaacgctggcggcgtgcctaacacatgcaagtcgaacggaacttatgtagaagattctttcgggatgattgtgatgaagtgtagtggcggacgggggaggaacgcgggaggaaccggcctgtgagaggggaataacaatatgaaaagattgctaataccgcataacatatatttgtcgcatggcagatatatcaaagagtttatcgctcaaagatggactcgcggccgattagttagctggtgaggaaacggctcaccaagaccgcgatcggtagccggctgagagggtggaacggccaaattgggactgggacacggaccagactcctacgggaggcagcagtgggggagattgcgcaatgcgggcaaccctgacgcagcaacgccgcgtgaaggatgaaggttttcggattgtaaacttcttttattaaggacgaaaaatgacggtacttaatgaataagctccg

SEQ ID NO: 10144 - DNA, 490 bp, unidentified
  misc_feature 1..490: note = Ascusbbf_1435164, encodes 16S rRNA
  source 1..490: mol_type = genomic DNA
agagtttgatcctggctcaggataaacgctggcggcgcacataagacatgcaagtcgaacgaacttaatcgaaagtttacttttgaagcggttagtggcggactggtgagtaacgcgtaagcaatctgcctatcagaggggaataacagtgagaaatcattgctaataccgcataagctgtgagtatcgcatgctacaaatagaaaaggagcaatccgctgatagatgagttcgcgtaagatgagatggtgagtggggtaacggcataccaagacgatgatcagtagccggactgagaggttacacggccgcatcaggactggggtgcgacccagactcctacgagcggcagcagtcgggaatgtttcacaatggaggaaactctgacgcagggacgccgcgtgcaggaagaaggttgtcggattgtaaactgctttagataggaaagaaaaaaaataacggtacctatagaataagctccggctaacta

SEQ ID NO: 10145 - DNA, 486 bp, unidentified
  misc_feature 1..486: note = Ascusbbf_1325216, encodes 16S rRNA
  source 1..486: mol_type = genomic DNA
agagtttgatcctgtctcagaacgaacgctgtcggcaggtcttcgtcatgcaagtcgaacggacgacagagtggcttgccattctgaagttagtggctcacgagtgagtaacgcttgggaaactgcccttcactggggactaacatctgtaaacgtacgctaatacctcatactcccccaaggggatatatttatctgtagttgattttcccgcttttgattagcttttttgtggtgtaatgacctaccaaggcgattatccctagcttgtctgagaggactatcagccacgctggaacttagacacggtccagacgcatacgggaggcagcagctaagaatagtgggcaatggaggaaactctgacccagccatgccgcgtgaatgaagaaggccttcgggttgtaaagttcttttagtcatgaagatgatgacagtagtgacagaaaaagcaccggctaacttcgtgccagcagccgcggtaat

SEQ ID NO: 10146 - DNA, 490 bp, unidentified
  misc_feature 1..490: note = Ascusbbf_1372823, encodes 16S rRNA
  source 1..490: mol_type = genomic DNA
agagtttgatcctggctcaggataaacgctggcggcgcacataacacatgcaagtcgaacggacttaatcgaaagcattcttttgacgcggatagtggcggactggtgtgtaacgcgtaagcactctgtctatcagaggggaataacagtgagaaatcattgctaataccgcataagctgtgagtatcgcatgatacaaatagaaaatgagcaatccgctgatagatgtgcttgcgtctgattagttagtaggtggggtaacggcctaccaagacgatgatcagtagccggactgagaggttaaacggcccgattgagactgcgatgcggcccagactcctacgggaggcagcagtcgagaatattgcgaaatggaggaaccgcggacgcagtgaaggcgcgtgcaggaagaaggttttcggattgtaaactgctttagatagggaagaaaaaaatgacggtacctatcgaataagctccggctaactac

SEQ ID NO: 10147 - DNA, 273 bp, unidentified
  misc_feature 1..273: note = Ascusbbf_1325220, encodes 16S rRNA
  source 1..273: mol_type = genomic DNA
agagtttgatcatggctcaggatgaacgctagcgacaggcttaacacatgcaagtcgaggggcagcatggaggtagcaatacttctgatggcgaccggcgcactggtgagtaacacgtatgcaacctgcccctggttgggggataacccgcggaaaggcgaccgaataccgggtatgcaccctggcttgatgacttgtgcgtggtagcacgtggtccagggagagggttgcggggcattagccatcggccagctccacgccagcacaaggcgt

SEQ ID NO: 10148 - DNA, 490 bp, unidentified
  misc_feature 1..490: note = Ascusbbf_1324561, encodes 16S rRNA
  source 1..490: mol_type = genomic DNA
agagtttgatcctggctcaggatgaacgctggcggcgtgcctaatacatgcaagtcgaacgaggtttctcttcggggaaaccgagtggcgaacgggtgagtaacacataggtaatctacctttcagactgggatacccaagagaaattttggctaataccgtctacaatcatttctcctcatggagatttgatgaaaggggctccaaagcctcgctgttagatgaacatgtggcacattagctagttggtgaaataacagccaaccaaggcgaagctgtgtagccgatctgagaggataatcggccacaaggggacggagacaccgcccgatctcctacgtgaggcagcagtagggagttttcggcaattggggaaaccctgaccgtgcaacgccgcgtgatttaggaggccctctgggtcggaagaatctgttgtaaaggagaagtggtagtgggaggaaatgcccattatttgatagtactttattag

SEQ ID NO: 10149 - DNA, 490 bp, unidentified
  misc_feature 1..490: note = Ascusbbf_1342517, encodes 16S rRNA
  source 1..490: mol_type = genomic DNA
agagtttgatcctggctcaggataaacgctggcggcgcacataagacatgcaagtcgaacggacttaactcattcttagcgatttcgagcggttagtggcggactggtgagtaatatataagtaacctgcctctcagaggggaacaacagttggaaacgactgctaataccgcatatgccacgagaatcacattgttcaattgggaaaggagcaatccgctgatagatggacttctatctgattagctagttggtggggtaacggcataccaaggcgacgatcagtagccggactgagaggttaaacggccaaattgggactgagaaccggcccagactcctgcgggaggcagcagtagggaatattgcgcaatggaggaaactctgacgcagtgaggccgcgtgcaggaagaaggttttcggattgtaaactgctttagacagggaagaaaaaagacagtatctggagaataagctccggctaactacg

SEQ ID NO: 10150 - DNA, 490 bp, unidentified
  misc_feature 1..490: note = Ascusbbf_1342505, encodes 16S rRNA
  source 1..490: mol_type = genomic DNA
agagtttgatcctggctcaggataaacgctggcggcgcacataagacatgcaagtcgaacggacttaactcattcttaacgattgagagcggttagtggcggactggtgagtaatgtataagtaacctgcctatcagaggggaacaacagttggaaacgactgctaataccgcatatgccacgagaatcacatggttcaagtgggaaaggagcaatccgctgatagatggacttatatctgattagctagttggtggggtaacggcctaccaaggcgacgatcagtaaccggactgagaggttgaacggccacattgggaatcagaaacggcacaaacgccgacggaaggacgcagtagggaagatgacggaatggaggaaacgcggacgcagtgacgccgcatgcaggaagaaggttttcggattgtaaactgctatagacagggaagaaaaaagacagtacctgtagaataagctccggctaactacg

SEQ ID NO: 10151 - DNA, 490 bp, unidentified
  misc_feature 1..490: note = Ascusbbf_1372712, encodes 16S rRNA
  source 1..490: mol_type = genomic DNA
agagtttgatcatggctcaggatgaacgctggcggcgtgcttaacacatgcaagtcgaacggagttatctcgctgaggagagcttgctcaaatcttgagataacttagtggggaaggggggggaactcggtgataaactggcttataaccgggggtaaacactagaaattggtgctaataacgcctaagcgcacggacccgcctgggaaagggtgaaaaaaccccgtgggttaagatgggtccgggtccgaatagaaaggtggggaaggaaacgcccaacaaagccaccgatcgtaagccggcctgagagggtgaacggccacattgggactgcgacacggcccaaactcctacgggaggcagcagtggggaatattgcacaatgggggaaaccctgatgcagcgacgccgcgtgagtgaagaagtatttcggtatgtaaagctctatcagcaaggaagaaaaaaatgacggtacttgactaagaagccc

SEQ ID NO: 10152 - DNA, 490 bp, unidentified
  misc_feature 1..490: note = Ascusbbf_1372357, encodes 16S rRNA
  source 1..490: mol_type = genomic DNA
agagtttgatcctggctcagaacgaacgctggctgcaggcttaacacatgcaagtcgcggggcatcatggcatgtagcaatacatgctgatggcgaccggcggatgggtgagtaacgcgtatccaacctggccctatctcgggtacagcccctcgaaagagggattaatcctcgatgttctctgggatccgcatgttttccagggcaaaggcatttgtcggttagggatggggaggtgtgcttttagtcagtcggcggggtcacggcccaccgcgccggcgatggataggggttctgagtgaaaggccccccacactgggactgagacacggcccaaactccgacgggaggaagcagtgaggaatattggtcaatggcggtgacgctgaaccagccaagtagcgtgagggattacggccctatgggttgtaaacctcttttgttagggagcaaccggtggcactagtgccattctgcgagtaccttacga

SEQ ID NO: 10153 - DNA, 490 bp, unidentified
  misc_feature 1..490: note = Ascusbbf_1342343, encodes 16S rRNA
  source 1..490: mol_type = genomic DNA
agagtttgatcatggctcaggataaacgctggcggcgcccataagacatgcaagtcgaacggacttaactcattcttaacgattgagagcggttagtggcggactggtgagtaatgtataagtaacctgcctatcagaggggaacaacagttggaaacgactgctaataccgcatatgccacgagaatcacatggttcaagtgggaaaggagcaatccgctgatagatggacttatatctgattagctagttggtggggtaacgacctaccaatgcgacgatcagtagccggactgagaggttagacggccacatatggactcaggtacggcccaactgcctgcgggaggcagcagtcaggaataatgcggaatggaggaaactctgacgcagtgacgccgcgggcaggaagaaggttttctgattgtaaactgctttagacagggaagaaaaaagacagtacctgtagaataagctccggctaactacg

SEQ ID NO: 10154 - DNA, 490 bp, unidentified
  misc_feature 1..490: note = Ascusbbf_1342177, encodes 16S rRNA
  source 1..490: mol_type = genomic DNA
agagtttgatcctggctcaggacgaacgctggcggcgtgcttaacacatgcaagtcgaacggtgaagcccagcttgctgggtggcttagttgcgaacgggtgcgtaacacgttagtaacctgcccctctctctgggataactccgggaaaccggtgctaatacagtatatgactacttcctgcatgggatggtggtggaaagtttttcggtgggggttggactcgcgggctatcagcttgttggtggggtaatggcctaccaaggcgacgacgggtagccggcctgagggggcgaccggccaccgtgggactgagacacggcccggactactacgggaggcagcagtgtggaatatggcacaatgggcgaaagcctgatgcagcgacgcggcgtgagggatgacggccttcgggttggaaacctcattcagcagggacgaagcttttgtgacggtacctgcagaagaagcaccggctaactacgtgccag

SEQ ID NO: 10155 - DNA, 490 bp, unidentified
  misc_feature 1..490: note = Ascusbbf_1372579, encodes 16S rRNA
  source 1..490: mol_type = genomic DNA
agagtttgatcatggctcaggatgaacgctagcggcaggcttaacacatgcaagtcgaggggtaacgcggggtagcaatactttggcgtcgaccggcgcacgggtgcgtaacgcgtatgcaacctacctgtaccaggggtataacggtgagaaatttccactaatcccccatattgttagagatccgcatgtttctctaactaaagtttcggtggtttcggatgcgcatgcgtgacattcgctagttgttacggtaatggtttaccaaggcgacgatgtctaggggagctgagaggcatatcacccacactggaactgagacacggaccaaactcctacgggaggcagcagtgaggaatattggtcaatggacgagagtctgaaccagccatgccgcgtggaggaagacggtcctatgggttgtaaactccttttgtgcgggggtaatgagaggcatgcgagccgcaatgagagtatcggacgaataagc

SEQ ID NO: 10156 - DNA, 471 bp, unidentified
  misc_feature 1..471: note = Ascusbbf_1324423, encodes 16S rRNA
  source 1..471: mol_type = genomic DNA
agagtttgtcctggctcagagcgaacgctggcggcatgcttaacacatgcaagtcgcacgaaggtttcggccttagtggcggacgggcgagtaacgcgcaggaatctatccatgggcgggggataactctgggaaactggagctaataccgcatgatacctgagggtcaaaggcgcaagtcgccggtggaggagcctgcgttcgatcagctagttggtggggtaatggcctaccaaagcgacgatcgatagctggtctgagcggatgaccagccacactgggattgagtcacggcccagacacctacgggaagcggcggtggggaatagtggacaatgggggcgacccagatccggcaatgccgcgtgtgtgaagaaggttttcggagaggaaagcacattcggcggtgacgatgatgacggtacccgcagaagaagccccggctaacttcgtgccagcagccgcggtaat

SEQ ID NO: 10157 - DNA, 490 bp, unidentified
  misc_feature 1..490: note = Ascusbbf_1342176, encodes 16S rRNA
  source 1..490: mol_type = genomic DNA
agagtttgatcctggctcaggatgaacgctagcggcaggcttaacacatgcaagtcgaggggtaacgctgggtagcaatactctggcgactaccggcgcacgggtgcgtaactcgtatgcaacctacctttaacatgggtataacggagagaaatttccactaatcccccatattgttagagattcgcatgtttctctaacgaaagcttcgttggttacggatgggcatgcgtgactttagctagttggtaaggtagctgcttaccaaggcgacgatgtttaggggagctgtgaggattaccccgcaagatggtactgagacacggaccatacgcctccgggaggcagcagtgaggaatattggtcaatggacggaagtctgaaccagccatgccgcgtggaggaagaaggtcctatgggttgtaaactccttttgttcgagagtaataagaggcttgcgagcctcgatgagagtatcggacgaataagc

SEQ ID NO: 10158 - DNA, 490 bp, unidentified
  misc_feature 1..490: note = Ascusbbf_1372513, encodes 16S rRNA
  source 1..490: mol_type = genomic DNA
agagtttgatcctggctcaggacgaacgctggcggcgtgcctaacacatgcaagtcgatcgagaattcttgatttgattctttcgggatgacgattaagaaggaaagcggcggacgggtgagtaacgcgtgagtaacctgccccatagaacggaatagcctagtgaaaactgtaataataccgtatgaagcagcagcaccgcatgatgcagctgttaacgatttatcgcgatgggatggactcgcttctgattatatggttggcggggtaacggccccccaagtcgacgatcagtcgccgaacggagtggttgatcggacaaattgggactgggacacggccccgactcctacgggaggcagcagtgggggatattgcacaatgggggaaacccggatgcagcaacgccgcgtgaaggaagaaggtcttcggattgtaaacttttgtctttagggaagaaacaaatgacggtacctaaggaggaagccac

SEQ ID NO: 10159 - DNA, 490 bp, unidentified
  misc_feature 1..490: note = Ascusbbf_1435411, encodes 16S rRNA
  source 1..490: mol_type = genomic DNA
agagtttgatcctggctcaggatgaacgctagcggcaggcttaacacatgcaagtcgaggggtaacgcggggtagcaatactctggcgacgaccggcgcacgggtgcgtaacgcgtatgcaacctacctgtcacaggggtatagcggagagaaatttccactaatcccccatattgttagagattcgcatgtttctctaacgaaagcttcggttgttacggatgggcatgcgtgacattagctagttggtaaggtaaaggcttacccaggcgacgatgtcttagggggccgcggggctaaatccccaacactggaactgagacacggaccagacgcctacgggaggcagcagtgaggaatattggtcaatggacggaagtctgaaccagccatgcagcgtggaggaagaaggccctatgggttgtaaactccttttgttcgagagtaataagaggcttgcgagcctcgatgagagtaccggacgaataag

SEQ ID NO: 10160 - DNA, 490 bp, unidentified
  misc_feature 1..490: note = Ascusbbf_1342375, encodes 16S rRNA
  source 1..490: mol_type = genomic DNA
agagtttgatcctggctcaggatgaacgctagcggcaggcttaacacatgcaagtcgaggggcagcgcggggtagcaatacttctggcggcgaccagcggaagggtgcgtaacgcgtcagcaacatgcccgtcgcaggtggataatcgatggaaacgtcgtctaagaccccgtaacaacatacctcgcatgggttttgtttgaatgcttcggctaccacggattgactcgcatcctattggacagttggcgggggaacggcccaccaaaccgacgatgggtatgtgttctgagtggaaggtcccgagtgatggagctgagacacgtgccaaactcctacgggaggcagaagtgaggaatattgggcaatgggcggcagcctgaaccacccatgccgcgtgcaggaataaggccctacgggtcgtaaactgcttttgtacgggagcaataagggtcacgagtggcctgatgagagtaccgtacgaataagc

SEQ ID NO: 10161 - DNA, 490 bp, unidentified
  misc_feature 1..490: note = Ascusbbf_1372472, encodes 16S rRNA
  source 1..490: mol_type = genomic DNA
agagtttgatcctggctcaggatgaacgctggcggcgtgcttaacacatgcaagtcgaacggagttatctcgctgaggagagcttgctcaaatcttgagctaacttagtggcggacgggtgagtaacgcgtggataacctgccttataccgggggataacacttagaaataggtgctaataccgcataagcgcacgctcccgcatgggaaagggtgaacaactccggtggtataagatggatcagcgtctgattagatagttggtgaggtaacggaccaccaagtcaacgatcagtagccggcctgagcggcggaacgaccacatggtgactgggacacggcccaaactcctacgggaggcagcagtggggaatattgcacaatgggtgaaacccggatgcagcgacgccgcgtgagtgaagaagtatgtcggtatgtaaagctctatcagcaaggaagaaaaaaatgacggtacttgactaagaagccc

SEQ ID NO: 10162 - DNA, 490 bp, unidentified
  misc_feature 1..490: note = Ascusbbf_1372577, encodes 16S rRNA
  source 1..490: mol_type = genomic DNA
agagtttgatcctggctcaggataaacgctggcggcgcacataagacatgcaagtcgaacggaattaactcatagttaacgattgagagcggttagtggcggacgggtgagtaaggtataagaaacctgcgcatcagaggggaacaacagcgggaaacgactgctaataccgcatatgccacgagaataacatggtgcaagtgggaaaggagcaatccgctgatagatggacttatatctgattagctagtgggtggggtaacggccaaccaaggcgacgatcaggagccggacggagaggtaaaacggccaaactgggactgagatacggcccagactcctacgggaggcagcagtcgcgcatattgagcaatggcgcaaacgctaacgaagagacgccgcgttcaggcagaaggttttcggattgtaaactgctttagacaggtaagaaaaaagacagtacctgtagaataagctccggctaactacg

SEQ ID NO: 10163 - DNA, 490 bp, unidentified
  misc_feature 1..490: note = Ascusbbf_1324580, encodes 16S rRNA
  source 1..490: mol_type = genomic DNA
agagtttgatcctggctcaggatgaacgctagcggcaggcttaacacatgcaagtcgaggggcagcgcgagagtagcaatacttttggcggcgaccggcggaagggtgagtaacgcgtgagcaacatgcccgtaacagggggataaccgttggaaacgacgactaatatcccgtaatatatcgagaggcatctcttgatattgaaagcttcggtggttacggattggctcgcgtctgattaggcagttggcggggtaacggcccaccaaaccgacgatcagtaggggttctgagaggaagggccaccaaatggggactgagacaaggtcacgaatcctacaggagggagcaggggggaatatttgacaaagggcggaaggctgatacagccatggcgggggaaggacgaagggcctatggggcggaaacatcttttgttgtggagcaataaggggtgcgagcagccccgatgagagtacacagcgaataa

SEQ ID NO: 10164 - DNA, 490 bp, unidentified
  misc_feature 1..490: note = Ascusbbf_1372551, encodes 16S rRNA
  source 1..490: mol_type = genomic DNA
agagtttgacctggctcaggatgaacgctagctacaggattaacacaggcaagtcgaggggcagcagaacgaaagcttgcttttgttgatggcgaccggcgcacgggggaggaacgcgtagccaaccttccccttaggagggcagagcccggcgaaagtcggagtaataccctatgttttccgttgaggacatctgaagtggaacaaagagttatcgcgaagggagggggaggcgtctgattaggttgttggcgggggaacggcccaccaagccatcgatcagtaggggttctgagaggaaggtccccaaccttggtactgagccccggcccaaactcctacgcgaggcagccgtgcggcatattggtcaatgggcgcgagcctgacccagccacgtagcgtgcaggatgacggccctatgggttgtaacctgcttttgcatgggaataaagtgagggacgtgtccctttttgtatgtaccatgagaata

SEQ ID NO: 10165 - DNA, 470 bp, unidentified
  misc_feature 1..470: note = Ascusbbf_1324579, encodes 16S rRNA
  source 1..470: mol_type = genomic DNA
agagtttgatcatggctcagaacgaacgctggcggaaggcttaacacatgcaagtcgaacgatcccttcggggatagtggcagacgggtgagtaacacgtgggaatctacctggttcttcgggataacagttggaaacgactgctaataccggatacgcccttttgggggcagctttatcggaatcgtatgagcccgcgtaagattagctagatggtggggtaatggcccaccatggcgacgatctttagctggtctgagaggctgctcagccacactgggactgagacacggcacagactccaacgtggggcagcaggggggagtattggacaatgggggcaaccctgagccagccatgccgcgtgagtgatgaaggccttagggttgtgaagctctttcagtagggaagataatgacggtacctacagaagaagccccggctaacttcgtgccagcagccgcggtaat

SEQ ID NO: 10166 - DNA, 490 bp, unidentified
  misc_feature 1..490: note = Ascusbbf_1372396, encodes 16S rRNA
  source 1..490: mol_type = genomic DNA
agagtttgatcctggctcaggacgaacgctggcggcatgcttaacacatgcaagtcgaacggactgattccttcgggatgaaatttattggcgaacgggtgagtaatgtatgagcaacctgcctctatcaacgggataacagttggaaacgactgctaatactgtatatgaccacggcaccgcattatgctgcggtaaaatatttttctgatagatatgggctcatatcccatttgctatttgttgagataacagcccaccaaggcgacgcttggtagcctagctgggaggctgatcggccacattgggactgaaaaacggaccagacacctacgggaggcagcagtggggaatattgggcaatggaggcaactctgacccagcaatgccgcgtgagtgatgaaggtaattttattgtaaagctcttttctcaggaacgaataaagatgacggtacctgaggaataagccccggctaactacgtgccagc

SEQ ID NO: 10167 - DNA, 490 bp, unidentified
  misc_feature 1..490: note = Ascusbbf_1324586, encodes 16S rRNA
  source 1..490: mol_type = genomic DNA
agagtttgatcatggctcaggatgaacgctagcggcaggcttaacacatgcaagtcgaggggtaacgcggggtagcaatactctggcgacgaccggcgcacgggtgcgtaacgcgtatgcaacctacctgtaacaggggtataacggagagaaatttccactaatcccccatatttttattctttcgcatgttaggataacgaaagcttcgttggttacggatggacgtgcgtgacattgggtaggtggtagggtaacggatagccaaggcgacgatgactaggtgggcggagaggcttatcacccacactggtactgagacacggaccagactcctacgggaggcagcagtgaggaatattggtcaatggacggaagtctgaaccagccaggtcgcgtggaggaagaaggtcctatgggttgtaaactccttttgttcgagagtaataagaggcttgcgagcctcgatgagagtatcggacgaataagc

SEQ ID NO: 10168 - DNA, 490 bp, unidentified
  misc_feature 1..490: note = Ascusbbf_1342239, encodes 16S rRNA
  source 1..490: mol_type = genomic DNA
agagtttgatcctggctcaggacgaacgctggcggcatgcttaacacatgcaagtcgaacggactgattccttcgggttgaaagttagtggcgaacgggtgagtaatgtatgagcaacctgcctctatcaacgggataacagttggaaacgactgctcatacggtataagaccacggcaccgcatgatgctgcggtaaaagatttttcggatagagatgggctcatatcccattagctagttggtgagataaaagcccaccaaggcgacgatcggtagccgagctgagaggctgatcggcgccattggggctgagagacggcccagacacctacgggagacggcggaggggagtattgggcaatggaggcgacactgagccagcaatgccgcgtgagtgatgaaggtaattttatggtaaagcgcttttctcaggaacgaataaagatgacggtacctgaggaataagccccggctaactacgtgccagc

SEQ ID NO: 10169 - DNA, 490 bp, unidentified
  misc_feature 1..490: note = Ascusbbf_1372575, encodes 16S rRNA
  source 1..490: mol_type = genomic DNA
agagtttgatcctggctcaggatgaacgctagctacaggcttagcacatgcaagtcgaggggcagcgagaaggaagctttctttctttgtcggcgaccggcgcacgggtgagtaacgcgtatccaaccttccctatagtagaggatagcccgtcgaaagtcggattaatactctatgttcttcgtagaggacatctgtaatgaagcaaagattaatcgctataggatggggatgcgtctgtttatgttgttggcggtgtaacggcccaccacaccatcgatcagtaggggtactgagagggaggtccccaccattggaactgagaaacggaccaaaagcctacggagggaagacgggaggaatattggtaaatgggcgagagcctgaaccagccaagtagcgggcaggatgacggccctaggggttgtaaactgcttttgcatgggaataaagtgagggacgtgtccctttttgtatgaaccatgagaat

SEQ ID NO: 10170 - DNA, 490 bp, unidentified
  misc_feature 1..490: note = Ascusbbf_1372531, encodes 16S rRNA
  source 1..490: mol_type = genomic DNA
agagtttgatcctggctcaggatgaacgctagcggcaggcttaacacatgcaagtcgaggggcagcgcggggtttccttactctctctgctaccgtccgacgggtgcgtaacgcgtgcgcatcatgcccttggcttggtgataagcgatgcgaacgtcgtctcagacctcgtcacaacactcctcgcatggggtttgtttgaaagcttcggctgccccggattggctcgcgtcccattaggaagttgggtgggtaacggcccaccagaccgacgcggcgtaggggttctgagaggaaggtccccaacaatggacgtgagacacggtccaaacgcctacgggaggaagaagtgaggaatattgggcaatgggcgagagactgaaccagccaggcagcgtgcaggatgaaggccctacgggtcgtaaactgcttttgtacgggagcaataaggggcacgagtggccggatgagagtaccgtacgaataagca

SEQ ID NO: 10171 - DNA, 490 bp, unidentified
  misc_feature 1..490: note = Ascusbbf_1324427, encodes 16S rRNA
  source 1..490: mol_type = genomic DNA
agagtttgatcctggctcaggatgaacgctggcggcgtgcttaacacatgcaagtcgaacggaaaggtttcttcggaattctttcagtggcggacgggtgagtaacgcgtgggtcagctgccccatacagggtaacaacagctggaaacggctgctaataccgcataaccgcacagtgctgcatggtaccgtgtgaaaagattttatcggtatgggatggaccctcgtctgattagctagttgggggggtaacggcgcacaacggcgacgctcagtagcagacctgagagggtgagcggccacattgggacggagacacggaccaaactcctacgggaggcagcagtggggtatatggcacaatgggcgaaagcctgatgcagcgacgccgcgtgagcgaggaagtatttcggtatgtaaagctctatcagcagggaagataatgacggtacctgactaagaagcaccggctaaatacgtgccagcagcc

SEQ ID NO: 10172 - DNA, 490 bp, unidentified
  misc_feature 1..490: note = Ascusbbf_1435438, encodes 16S rRNA
  source 1..490: mol_type = genomic DNA
agagtttgatcatggctcaggatgaacgctagctacaggcttaacacatgcaagtcgaggggcagcataacgaaagcttgcttttgttgatggcgaccggcgcacgggtgagtaacgcgtatccaaccttccccttagtagggcatagcccggcgaaagtcggattaataccctatgttttccgttgaggacatctgaagtggaataaagatttatcgctaagggatggggatgcgtctgattaggttgttggcggggtaacggcccaccaagccatcaatcagtaggggttctgagaggaagatccaacacaatggtactgagaaacggagaaaaatactcggggaggcaacagtgcggaaaagtggtcagtgggcgggagcctgaaccagcaaagaagcgtgcaggatgacggccctatgggttgtagactgcttttgcatgggaataaagtgagggacgtgtccctttttgtatgtaccatgagaat

SEQ ID NO: 10173 - DNA, 490 bp, unidentified
  misc_feature 1..490: note = Ascusbbf_1372552, encodes 16S rRNA
  source 1..490: mol_type = genomic DNA
agagtttgatcctggctcaggatgaacgctggcggcgtgcctaacacatgcaagtcgaacggaaaggattcgtcggaattctttcagtggcggacggaggaggaacgcgtgggtaaccggccccatacaggggaacaacagctggaaacggcggcgaataccgcataagcgcacagtactgcatggtacagtgtgaaaagattttatcggtatgggatgaacccgcgtctgattagctagttggaggggtagcggcccaccaaggcgacgatcagtagccgacctgagagggtgaccggcccaattgggactgagccacggcacacactcctacgggaggcagcagtgggggatattgcacaatgggcgaaagcctgatgcagcgacgccgcgtgagtgaggaagtttttcggtatgtaacgctctatcagcagggaagaaaatgacggttcctgactaagaagccccggctaactacgtgccagcagcc

SEQ ID NO: 10174 - DNA, 490 bp, unidentified
  misc_feature 1..490: note = Ascusbbf_1372529, encodes 16S rRNA
  source 1..490: mol_type = genomic DNA
agagtttgatcatggctcaggatgaacgctggcggcgtgcctaatacatgcaagtcgaacgaggtttcccttcggggaaaccgagtggcgaacgggtgagtaacacataggtaatctacctttcagaatgggatacccaagagaaattttggctaataccgtatacaatcatttctccgcatggagatttgatgaaaggggctccaaagcctcgctgttagatgaacctgtggcacattagctagttggtgagataacagcccaccaaggcgaaggtgtgtagccgatctgagaggataatcggccacaatgggacggggatacggcccaaactacaacgggaggcagaagtagagaggtgtcggcaaggggggaaacgctgaccgggcaacgccgcgtgatgtagaaggccctctgggtcggaagaatctgttgtaaaggagagagggtagtgggaggaaatgcccattatttgatagtacttgattag

SEQ ID NO: 10175 - DNA, 490 bp, unidentified
  misc_feature 1..490: note = Ascusbbf_1324595, encodes 16S rRNA
  source 1..490: mol_type = genomic DNA
agagtttgatcctggctcaggatgaacgctagcggcaggcttaacacatgcaagtcgaggggtaacgcggggtagcactactctgtcgactaccggcgcacgggtgcgtaccgcgtatgcaacctacctgtaacagggttataacggagagaaatttccactaatcccccatattgttagagattcgcatgtttctctaacgaaagcttcggtggttactgatgggcatgcgtgacattagctatttggtaaggtaacggcttaccaaggcgacgatgtctatgggagctgagaggcttatcaccacaactggtactgagacacggaccagactcctacgggaggcagcagtgaggaatattggtcaatggacggaagtctgaaccagccaggccgcgtggaggaagaaggtcctatgggtggtaaactccttttgtgcgagagtaataagaggcgtgcgagcctagatgagagtatcggacgaataagc

SEQ ID NO: 10176 - DNA, 490 bp, unidentified
  misc_feature 1..490: note = Ascusbbf_1325123, encodes 16S rRNA
  source 1..490: mol_type = genomic DNA
agagtttgatcctggctcaggacgaacgctggcggcatgcttaacacatgcaagtcgaacggactgattccttcgggatgaaagttattgtcgaacgggtgagtaatgtatgagcaacctgcctctctccacgggataacagttggaaacgactgctaatacggtgtaagaccacggcaccgcatggtgctgcggtaaaagatttttcagacagagatgggctcatatcccattagctagttggtgagataatagcccaccaaggcgacgatgggtagccgagctgagagccggatcggcgacactggggctgaaacacggaccagagacctacgggagggagaagtggggaatattgggcaatggaggaaactctgacccagcaatgccgcgtgagcgataaagggaattttattgtaaagctcttttctcaggaacgaataaagatgacggtacctgaggaataagcaccggctaactacgtgccagc

SEQ ID NO: 10177 - DNA, 490 bp, unidentified
  misc_feature 1..490: note = Ascusbbf_1341693, encodes 16S rRNA
  source 1..490: mol_type = genomic DNA
agagtttgatcatggctcaggatgaacgctggcggcgtgcctaacacatgcaagtcgaacggaaaggattcttcggaattctttcagtggcggacgggtgcgtaacgcgtgggtaacctgccccatacaggggaacaacagctggaaacggctgctaataccgcataatcgcacagttctgcatggtacagtgtgaaaagattttgtcggtatgggatggatccgcgtctgattagctagttggagcggtaacggcccaccaagccgacgatcagtaggcgacctgagagggtgaccggcaacattgggactgagacaccgcccaaactcctacgggaggcagcagtgggggatcttgcaccataggcgggagcctgatgcagcgacgcagcgggagtgaggaagtatttcggtatgtaaagctctatcagcagggaagaaaatgacggtacctgactaagaagccccggctaactacgtgccagcaccg

SEQ ID NO: 10178 - DNA, 486 bp, unidentified
  misc_feature 1..486: note = Ascusbbf_1341707, encodes 16S rRNA
  source 1..486: mol_type = genomic DNA
agagtttgatcctggctcagaacgaacgctggcggcaggtcttaggcatgcaagtcgaacggacgacagagtggcttgccattctgaagttagtggcgcacgagtgagtaacgcgtgggaaactgcccttcactggggaataacgtctggatacggacgctaataccgcatacgcccgcaaggggaaagatttatcggtgttgatggtgcctgggttggatgagcttgttgttggggaaatggcctaccaaggcgatggtccatagctgggctgagaggacgatcagccacgcgggaactgagacagggtccagactccgacggggggcagcagctaagaatattgggaaatggaagaaactctgacccagccatgccgcgtgaatgaagaaggccttcgggttgtaaagttcttttagtcatgaagatgatgacagtagtgacagaaaaagcaccggctaacttcgtgccagcagccgcggtaat

SEQ ID NO: 10179 - DNA, 486 bp, unidentified
  misc_feature 1..486: note = Ascusbbf_1377813, encodes 16S rRNA
  source 1..486: mol_type = genomic DNA
agagtttgatcctggctcaggatgaacgctagctacaggcttaacacatgcaagtcgaacggacgacagagtggcttgccattctgaagttagtggcgcacgagtgagtaacgcgtgggaaactgcccttcactggggaataacgtctggaaacggacgctaataccgcatacgcccgcaaggggaaagatttatcggtcacggatgtgcccgcgttggattagcttgttggtggggtaatggcctaccaaggcgatgatccatagctggtctgagaggacgaacagccacgctggaactgagacacggaccagactcctacgtggggcagcagctaagaatactgagcaatggaggaaactctgacccagccatgccgcgggaatgaagaaggccttcgggttgtaaaaagcttttagtcatgaagatgatgacagtagtgacagaaaaagcaccggctgacttcgtgccagcagccgcggtaat

SEQ ID NO: 10180 - DNA, 486 bp, unidentified
  misc_feature 1..486: note = Ascusbbf_1324996, encodes 16S rRNA
  source 1..486: mol_type = genomic DNA
agagtttgatcctggctcaggatgaacgctagctacaggcttaacacatgcaagtcgaacggacgacagagtggcttgccattctgaagttagtggcgcacgagtgagtaacgcgtgggaaactgctcttcactggggcataacgtctggaaacggacgctaataccgcttacgcccgccaggggatggacttatcggtgacggatgtgcccgctttggattagcttgttggtggcgtaatggcctaccagggcgatgatccatagctggtctgagaggacgatcagccacgacggaaatgagacacggtccagactccaacgggaggcagcagctaagaatattgggcaatggaggaaactctgacccagccatgccgcgtgaatgaagaaggccttcgggttgtaaaaatcttttagtcatgaagatgatgacagtagtgacagaaaaagcaccggctgacttcgtgccagcagccgcggtaat

SEQ ID NO: 10181 - DNA, 486 bp, unidentified
  misc_feature 1..486: note = Ascusbbf_1377631, encodes 16S rRNA
  source 1..486: mol_type = genomic DNA
agagtttgatcatggctcagaacgaacgctggcggcaggtcttaggcatgcaagtcgaacggacgacagagtggcttgccattcttcagttagtggcgcacgagtgagtaacgcgtgggaaactgcccttcactggggaataacgtctggaaacggacgctaataccgcatacgcccgcacggggaaagatttatcggtggtggatgttcccgcgttggcttcgcttgttggtggggtattggcctacccaagcgatgatccttagctggtctgggaggacgctcagcaacgctggaactgagaaacggtccagactcctacgggaggcagcagctaagaatatcgggcaatggaggaaactctgaaccagccatgccgcgtgaatgaagaaggccttcgggttgtaaagttcttttagtcatgaagatgatgacagtagtgacagaaaaagcaccggctaacttcgtgccagcagccgcggtaat

SEQ ID NO: 10182 - DNA, 486 bp, unidentified
  misc_feature 1..486: note = Ascusbbf_1341662, encodes 16S rRNA
  source 1..486: mol_type = genomic DNA
agagtttgatcatggctcagaacgaacgctggcggcaggtcttaggcatgcaagtcgaacggacgacagagtggcttgccattcttcagttagtggcgcacgagtgagtaacgcgtgggaaactgcccttcactggggcataacgtctggaaacggacgctaatccctcatacgcccgcacgggtaaagatttatcggttatggattttcccgcgttggagtagctggttggtgggttaatggcctcccaatgcgatgatccatagctggtcttagaggccgatcagccacgcgggaactgagacacggtccagactccgacgggaggcagcagctaagaatattgggcaatggaggaaactctgacccagccatgccgcgtgaatgaagaaggccttcgggttgtaaagttctttgaggcatgaagatgatgacagtagtgacagaaaaagcaccggctaacttcgtgccagcagccgcggtaat

SEQ ID NO: 10183 - DNA, 490 bp, unidentified
  misc_feature 1..490: note = Ascusbbf_1377667, encodes 16S rRNA
  source 1..490: mol_type = genomic DNA
agagtttgatcatggctcaggatgaacgctagcggcaggcttaacacatgcaagtcgaggggtaacgcggggtagccctcctctttctactaccggcgcacgggtgcgtaacgcgtatgcaacctacctgtcccaggggtataacggagagaaatttccactaatcccccctcttgttatagattcgcatgtttctctaacgaacgcttcgttgcttacggatgggcatgcgtgacattcgctagttggtaaggtaacggcttaccaaggcgacgatgtctaggggtggtgagaggcttatcccccacactgggactgcgacacggaccagactcctacgggaggaagcagtgaggaaaatggggcaatggacgggagactgaaccagccatgcagcgtggaggaagaaggtcctatgggttgtaaactccttttgttcgagagtaataagaggctggcgagcctcgatgagagtatcggacgaataagc

SEQ ID NO: 10184 - DNA, 490 bp, unidentified
  misc_feature 1..490: note = Ascusbbf_1325067, encodes 16S rRNA
  source 1..490: mol_type = genomic DNA
agagtttgatcatggctcaggatgaacgctagcggcaggcttaacacatgcaagtcgaggggtaacgcggggtagcaatcctctgtcgacgaccggcgcacgggtgcgtaacgcgtatgcaacctacctgtaacaggggtataacggagagaaatttccactaatcccccatattgttattctttcgcctgttcggataccgaaagcttcgttggttacggatgggcatgcgtgccattagctagttggtaaggtaacggcttaccacggcgactctgtctatgggagctgagaggcttataccccagacgggtacagcgcaacagaccagaaccctacgcaaggaagcagggaggagtattggtcaatggacggaagtctgaaccagccatgccgcgtggaggaagaagggcctatgggtggtaaactccttttgtgcgagagtaataagaggcttgcgagcctcgatgagagtatcggacgaataagc

SEQ ID NO: 10185 - DNA, 470 bp, unidentified
  misc_feature 1..470: note = Ascusbbf_1324981, encodes 16S rRNA
  source 1..470: mol_type = genomic DNA
agagtttgatcctggctcagaacgaacgctggcggcaggcttaacacatgcaagtcgagcgcactcttcggagtgatcggcattcgggtgagtaacacgtggggatctaccaatctctaggcaataattcactgaaacttgtgctactaccctatacgcccttttgtggaaagatttatcggagtttgacgagcccgcgtgggattagctagttggtgatttaagagctcaccaaggcgacgatccctagctggtatgaggggttgatccgctacactgggactgagacacggcccagactcttagggaagggagcagtggggaatatgggacgaggcgcgcaagacggagccagccaggccgcaagggtgatgaaggccggacggatgtaaagcactttcaccgatgaagataatgacggtagtcggagaaaaagccccagctaactatgtgccagcagccgcggtaat

SEQ ID NO: 10186 - DNA, 490 bp, unidentified
  misc_feature 1..490: note = Ascusbbf_1445465, encodes 16S rRNA
  source 1..490: mol_type = genomic DNA
agagtttgatcctggctcaggacgaacgctggcggcgtgcctaacacatgcaagtcgaacggaacttatttagaagattttttcgggatgattttgattaagtttagtggcggacgggtgagtaacgcgtgagtaacctgcctttgagaggggaataacaatctgaaaagattgctaataccgcataacatatatttgtcgcatggcagatatatcaaagattttatcgctcaaagatggactcgcgtccgattagttagttggtgaggtaacggctcaccaagaccgcgatcggtagccgaacgggagcaggacgggagggttgaccggacacattgggactgagaaacggcccagcatcctacgggaggcagaagtgggaggtattgcgcaatgggggaaacccggacgcagcaacgccgcgtgaagaatgaaggttttcggattgtaaacttcttttattagggacgaaaaatgacggtacttaatg

SEQ ID NO: 10187 - DNA, 486 bp, unidentified
  misc_feature 1..486: note = Ascusbbf_1341792, encodes 16S rRNA
  source 1..486: mol_type = genomic DNA
agagtttgatcatggctcagaacgaacgctggcggcaggccttaggcatgcaagtcgaacggacgacagagtggcttgccattctgaagttagtggcgcacgagtgagtaacgcgtgggcaactgcccttcactggggaataacgtctggcaacggacgctaataccgcatacgcccgcaaggggaaagatgtgtcggtgatggatgtgcccgcgttggattagcttgttggtggggtactggcctaccaaggcgatgatcaatagctggtctgagtgaacgatcagccacgctggaactgagacacggtccagactcctacggggggcaagaggtaagaatatcgggcaatggaggaaactctgacccagccatgccgcgtgaatgaagaaggccttcggggtgtaaagttcttttagtcatgaagatgatgacagtagtgacagaaaaagcaccggctaacttcgtgccagcagccgcggtaat

SEQ ID NO: 10188 - DNA, 490 bp, unidentified
  misc_feature 1..490: note = Ascusbbf_1377848, encodes 16S rRNA
  source 1..490: mol_type = genomic DNA
agagtttgatcctggctcaggatgaacgctggcggcgtgcctaacacatgcaagtcgaacggaaacaattcttcggaattctttcagtggcggacgggtgagtaactcgtggttaacctgccccatacatgggaacaacagctggaaacggctgctaataccgcctaagcgcacagtactgcatggtacagtgtgaaaagactttatcggtatgggaggtatccgcgacggattagctagttgcagtggtaacggcccaccaaggcaacgatcagtagccgacctaggagggtgccgggcaccattgggcctgagcaacggcacaaagtccaacgtggggcagcagtcgggaatattgaacaatggactaaagcctgaggcagcggcgccgcgtgggtgaggaagtatttcggtatgtaaagctctatcagcagggcagaaaatgacggtacctgactaagaagccccggctaactacgtgccagcagcc

SEQ ID NO: 10189 - DNA, 490 bp, unidentified
  misc_feature 1..490: note = Ascusbbf_1377840, encodes 16S rRNA
  source 1..490: mol_type = genomic DNA
agagtttgatcctggctcaggacgaacgctggcggcgtgcttcatacatgcaagtcgaacgagaaactaacttcggttagtggaaagtggctgacgggtgagtaatatgtagataatctgccctagagagggggacaaccgttggaaacgacagctaataccccatatgagcgtaactgaaatgttattcttgaaaactccggtgctctaggatgagtctgcatctgattagctagttggggtggtaattgaccaccaaggccacgatcagtagctggtttgagaggatgatcagccaccaagagactgagacacgggccaaaatcctacgggaggcagcagtagggaattttgcgcaatgggcgaaagcctgacgcagcaacgccgcgtgatcgagacgcttttcggagtgtaaagatctgtcacaggggacgaacaatgacggtaccctgagaggaagcaccggctaactccgtgccagcagccgcgg

SEQ ID NO: 10190 - DNA, 470 bp, unidentified
  misc_feature 1..470: note = Ascusbbf_1445496, encodes 16S rRNA
  source 1..470: mol_type = genomic DNA
agagtttgatcatggctcagaacgaacgctggcggcaggcttaacacatgcaagtcgagcgccctcttcggagggagcggcagactggtgagtaacacgtgggaatctacccatctctagggaataactcagggaaacttgtgctaataccctatacgcccttcgggggaaagatttttctgaggtggataagcccgcgttggattagctagttggtggggtaatggctcaccaaggcgactatccatagctggtctgagaggatgatcagccacactgggactgagacacggcccagactccgacgggaggcagcagtggggaagattggacaatgggcgaaagccggatccagccatgccgcgtgtgtgatgaaggccttagggttgtaaagcactttcaccgatgaagataatggcggtagtcggagaagaagccccggctaacttcgtgccagcagccgcggtaat

SEQ ID NO: 10191 - DNA, 490 bp, unidentified
  misc_feature 1..490: note = Ascusbbf_1445687, encodes 16S rRNA
  source 1..490: mol_type = genomic DNA
agagtttgatcctggctcaggatgaacgctagctacaggcttaacacatgcaagtcgaggggcagcataacgaaagctggcttttgttgatggcgaccggcgcacgggggagtaacgcgtatccaaccttccccgtagtagggcagagcccggcgaaagtcggatgaataccctatgttttccgttgaggacatcttaagtggaaccaagatttatcgctaagggatggggatgcgtctgattaggttgttggcggggtaacggcacaccaagccatcgtgaagaaggggttctgagaggaaggtccaccaacgtggtactgagacacggaacaaactcctacgggaggcagccgtgaggaatattgggcaatgggcgagagcctgaaccagccaagtagcgtgcaggatgacggccctatgggttgtaaactgcttttgcatgggaataaagtgagggacgtgtccctttttgtatgtaccatgagaat

SEQ ID NO: 10192 - DNA, 488 bp, unidentified
  misc_feature 1..488: note = Ascusbbf_1445624, encodes 16S rRNA
  source 1..488: mol_type = genomic DNA
agagtttgatcctggctcagaacgaacgctggcggcaggcttaacacatgcaagtcgagcgggattgattagtagcttgctttttatcatgagagcagcgcactggtgagtaacacgtgggtacataccttttggtgggggacaacagttggaaacgactgctaataccgcatcagctctgaggtggaaagattaattgccgtggaattggcccgcggaagtttaggtagtaggtggggtaacggcctacctagccgacgatctatagctggtctgagaggacgatcagccacattggaagtgagacacggaccagactcctacggggggcaacagtggggaatattgagcaatggaggaaactcagacccagccatgccgcgtgggtgaagaaggttttcggaggggaaagcgctttcagacgggaagatgatgacggtaccgtaagaagaagcaccggctaacttcgtgccagcagccgcggtaat

SEQ ID NO: 10193 - DNA, 486 bp, unidentified
  misc_feature 1..486: note = Ascusbbf_1377729, encodes 16S rRNA
  source 1..486: mol_type = genomic DNA
agagtttgatcatggctcagaacgaacgctggcggcaggtcttaggcatgcaagtcgaacggccgaccgagtggcttgccattctgcagttagtggcgcacgagtgcgtaacgcgtgggcaactgcccttcactggggcataacgtctggaaacggacgctaataccgcatccgcccgcaaggggaaagatttatcggtgatggatgtgcccgcgttggtttcgcttgttggtggggtaatggcctcccaaggcggttgtccatagctggtctgagaggacgttcagccacgctggaactgggacacggtccagactcctacgggaggcagcagctaagaatattgggcaatggaggaaactctgacccagccatgccgcgtgaatgaagaaggccttcgggttgtaaagttcttttagtcatgaagatgatgacagtagtgacagaaaaagcaccggctaacttcgtgccagcagccgcggtaat

SEQ ID NO: 10194 - DNA, 486 bp, unidentified
  misc_feature 1..486: note = Ascusbbf_1325055, encodes 16S rRNA
  source 1..486: mol_type = genomic DNA
agagtttgatcatggctcagaacgaacgctggcggcaggtcttaggcatgcaagtcgaacggacgacagagtggctttccattctgaagttagtggcgcacgagtgcgtaacgcgtgtgcaactgcccttcactggggcataacgtctggacacggacgctaataccgcatacgcccgcaaggggaagggtttatcggtgttggatgtgcccgcgttggattagcttgttggtggggtaatggcctaccaaggcggtgatccatcgctggtctgagaggacgatcagccacgctggaactgagacacggtccagaatcctacgggaggcagcagctaagaatattgggcaatggaggaaacgcggacccagccatgccgcgtgaatgaagaaggccttcgggttgtaaagtgcttttagtcatgaagatgatgacagtagtgacagaaaaagcaccggctaacttcgtgccagcagccgcggtaat

SEQ ID NO: 10195 - DNA, 490 bp, unidentified
  misc_feature 1..490: note = Ascusbbf_1323765, encodes 16S rRNA
  source 1..490: mol_type = genomic DNA
agagtttgatcctggctcaggatgaacgctagcggcaggcctaacacatgcaagtcgaggggtagaacacttcggtgtttgagaccggcgcacgggtgcgtaacgcgtatgcaatctaccttatacaggggaatagcccagagaaatttggattaatgccccatggtattatagagtggcatcactttataattaaagttccaacggtataagatgagcatgcgtcccattagttagttggtaaggtaacggcttaccaagacgatgatgggtaggggtcctgagagggagatcccccacactggaactgggacacggaccagactcctacgggaggcagcagtgaggaatattggtcaatggtcgcaagactgaaccagccatgccgcgtgcaggaagacggtcctatggattgtaaactgcttttatacaggaagaaaccctcccacgtgtgggagcttgacggtactgtaggaataaggatcggcta

SEQ ID NO: 10196 - DNA, 490 bp, unidentified
  misc_feature 1..490: note = Ascusbbf_1325027, encodes 16S rRNA
  source 1..490: mol_type = genomic DNA
agagtttgatcatggctcagaacgaacgctggcggcaggcttaacacatgcaagtgggacgggaagcgagggatagctggctattgattgaggagaggaacgcacgggtgagtaacacgtgggaacataccggatagggggggagaacaagtggaaacgattgataataccgcataagtcctaagggagaaaggagcaattcgctataagattggcccgcggaagattaggcaggtggtggggtaaaggcctaccaaacctacgatctatagctggtctgagaggacgatcagccacattgggactgcgacacggccccgactcctacggggggcagcagtgcggcatattgggcactgggggcaaccctgacccagccctgccgcgtgagtgaagaaggttttcgaattgtaaagctctttcggatgtgaagatgatgacggtagcatctcaagacgccccggcaaacttcgtgccagcagccgcggta

SEQ ID NO: 10197 - DNA, 288 bp, unidentified
  misc_feature 1..288: note = Ascusbbf_1325038, encodes 16S rRNA
  source 1..288: mol_type = genomic DNA
agagtttgatcctggctcaggatgaacgctagcggcaggcttaacgcatgcaagtcgaggggtaacgcgaggtaacaatactctggctactaccggcgcacggccgcgtaacgcgtgtggaacctccctgtcacgggggtattgcggaccgatgtttccactgatcccccatattgttgttctttcgcatgttaggataacgaaagcaagaatgggggcgggggggcaagcgtggcgttagctagttggtgagggaacggcgaaccaaggccacgaagtcgaggggag

SEQ ID NO: 10198 - DNA, 490 bp, unidentified
  misc_feature 1..490: note = Ascusbbf_1325012, encodes 16S rRNA
  source 1..490: mol_type = genomic DNA
agagtttgatcctggctcaggatgaacgctggcggcgtgcttaacacatgcaagtcgaacggagttatctcgctgaggagagcttgctcaaatcttgagatgacttagtggcggacgggtgagtaacgcgtggataacctgccttataccgtgggataacacttagaaataggtgctaataccgcataagcgcacgatcccgcatgggaaagtgtgaaaaactccggtggtataagatggatccgcgtgtgatgagatagttggtgaggtaacggcccaccaagtcaacgctcagtagccgacctgggaggggtgacggccacattgggaattagacacggccccaactcctacgggaggtagcagtggggaatattgcacaatggggggaaccctgatgcagcgaagccgcgtgagtgaagaagtatctcggtatgtaaagctctatcagcaaggaagaaaaaaatgacggtacctgactaagaagccc

SEQ ID NO: 10199 - DNA, 486 bp, unidentified
  misc_feature 1..486: note = Ascusbbf_1445679, encodes 16S rRNA
  source 1..486: mol_type = genomic DNA
agagtttgatcatggctcagaacgaacgctggcggcaggcctcaggcatgcaagtcgaacggtcgccagagtggctttccattctgttgttagcggcgcacgagcgagtaacgcgtgggtaactgcccttcactggggtataacgtctggaaacggacgccaacaccgcatacgcccgcaaggggacagacttaccggtgctggaggtgccggcgtgggattagcctgttggtggggtaattgccgcccaaggcgaggatccatagctggtctgggaggacgatcagccacgctgggactgagacacggtccagggtcctacggggggcagcagctgagaatattaggcactggaggaaactctgacccagccatgccgcgtgaatgaagaaggccttcgggttgtaaagttcttttagtcatgaagatgatgacagtagtgacagaacaagcaccggctaacttcgtgccagcagccgcggtaat

SEQ ID NO: 10200 - DNA, 490 bp, unidentified
  misc_feature 1..490: note = Ascusbbf_1445686, encodes 16S rRNA
  source 1..490: mol_type = genomic DNA
agagtttgatcatggctcaggataaacgctggcggctcacataagacatgcaagtcgaacgaacttaatcgaaagtgtacttttgaagcggttagtggcggactggtgagtaactcgtaagcaatctgcctatcagaggggaataacagtgagaaatcattgctaataccgcataagctgtgagtatcgcatgatacaaatagaaaaggagcaatccgctgatagatgagcttgcttctgattagttagttggtggggtaacggcccaccaagacgatgatcagtagccggactgagagggtaaacggccacattgggacggcgatacggcccagaaccgtccgggagggagcagtcgggactattgcgcaatggaggacactctgacgcagtgacgccgcgtgcaggaagaaggttttcggattgtaaactgatttagatagggaagaaaaaaatgacggtacctatagaataagctccggctaactac

SEQ ID NO: 10201 - DNA, 488 bp, unidentified
  misc_feature 1..488: note = Ascusbbf_1341767, encodes 16S rRNA
  source 1..488: mol_type = genomic DNA
agagtttgatcatggctcagaacgaacgctggcggcaggcttaacacatgcaagttgagcgggattgattgatagcttgctattgctcatgagagcagcgcactggtgagtaacacgtgggaacataccttttggtgggggacaacagttggaaacgactgctactaccgcctcagccctgagggggaaagattaattgccgagagattggcccacggaagattaggtagtaggtggggtaacggcctacctacccgacgatctatagctggtctgagaggacgatcagccacattggaacggggacacggtccagaagcgaacggggggcaacagagaggagtattaggcaatggagggaactcggagccagccacgccgcgtgagggaagaaggttttcggagggtaaagcgcttgcagacgggaagatgatgacggtaccgtaagaagaagcaccggctaacttcgtgccagcagccgcggtaat

SEQ ID NO: 10202 - DNA, 488 bp, unidentified
  misc_feature 1..488: note = Ascusbbf_1377735, encodes 16S rRNA
  source 1..488: mol_type = genomic DNA
agagtttgatcatggctcagaacgaacgctggcggcaggcttaacacatgcaagttgagcgggattgtttgatagcttgctattgatcatgagagcagcgcactggtgagtaacacgtgggaacataccttttggtgggggacaacagttggaaacgactgctaataccgcataagccctgagggggaaaggttaattgccgagagattggcccacgggagattaggtagtaggtggggtaacggcctacctagccgacgatctatcgctggtctgagaggacgatcagccacattggaacggagagacggtccagagtcgtacgggaggcaacggggaggaatattgggcaatggagggaactctgagccagccatgccgcgtgagggaagaaggttttcggagtgtaaagcgcgagcagacgggaagatgatgacggtaccgtaagaagaagcaccggctaacttcgtgccagcagccgcggtaat

SEQ ID NO: 10203 - DNA, 488 bp, unidentified
  misc_feature 1..488: note = Ascusbbf_1342406, encodes 16S rRNA
  source 1..488: mol_type = genomic DNA
agagtttgatcatggctcagaacgaacgctggcggcaggcttaacacatgcaagttgagcgggattgattagtagcttgctattgatcatgagagcagcgcactggtgagtaacacgtgggaacataccttttggtgggggacaacagttggaaacgactgctaataccgcataagccctgagggggaaagattaattgccaaaaggttggcccgcggaagattaggtagtaggtgggttaacggcctacctagccgacgatcgatagctggtctgagaggacgatcagccacattggaactgcgacagggtccagagtcgtacggggggcagcagtggggaatattgggcaacggaggcacctctgaccaagccacgccgcgtgagtgaagaaggttttcggatggtaaagctctttcagacgggaagatgatgccggtaccgtaagaagaagcaccggctaacttcgtgccagcagccgcggtaat

SEQ ID NO: 10204 - DNA, 486 bp, unidentified
  misc_feature 1..486: note = Ascusbbf_1372630, encodes 16S rRNA
  source 1..486: mol_type = genomic DNA
agagtttgatcatggctcagaacgaacgctggcggcaggtcttaggcatgcaagtcgaacggacgacagagtggcgtgccattctgaaggtaggggcgcacgagggagtaacgcgtgggaaccggcccttcactggggaagaacgtcgggaaacggacgctaataccgcatacgcccgcaaggggcacgagttatcggtgatggatgtgcccgcgttggattagcttgttgttggggtaatggcctaccaaggcgatgatccatagctggtctgagaggacgatcagccacgctggaactgagacacggtccagactcctacggggggctgcagctaagaatattgggcaatggaggaaactctgacccagccatgccgcgtgaatgaagaaggccttcgggttgtaaagttcttttagtcatgaagatgatgacagtagtgacagaaaaagcaccgtctaacttcgtggcagcagccgcggtaat

SEQ ID NO: 10205 - DNA, 490 bp, unidentified
  misc_feature 1..490: note = Ascusbbf_1435325, encodes 16S rRNA
  source 1..490: mol_type = genomic DNA
agagtttgatcctggctcaggatgaacgctagcggcaggcttaacacatgcaagtcgaggggtaacgcggggtagcaatactctggcgacgaccggcgcacgggtgcgtaacgcgtatgcaacctacctgtaacaggggtataacggcgagaaatttccactaataccccatattgttattctttcgcatgttaggataacgacagcttcggtggttacggatggggatgcgtgacattagctagtgggtaaggtaacggcttaccaaggcgacgatgtctaggggagctgagaggcttatcgcccacgctggtagtgagacacggatcagactactacgggaggcagcagcaaggaagagtgggcaatggggagaagtgtgaaccagacgagcctcgtgggggaagaaggtgctagtggtaggaaactccttgtgttggagagtaataagaggcgggcgagccacgaggagagtatcggacgaataggc

SEQ ID NO: 10206 - DNA, 490 bp, unidentified
  misc_feature 1..490: note = Ascusbbf_1372598, encodes 16S rRNA
  source 1..490: mol_type = genomic DNA
agagtttgatcctggctcaggataaacgctggcggcgcacataagacatgcaagtcgaacgaacttaatcgaaagtttacttttgaagcggttagtggcggactggtgagtaacgcgtaagcaatctgcctatcagaggggaataacagtgagaaatcatttctaataccgcctaagctgtgagtatcgcatgatacaaatagaaaagtagcaatccgctgatagatgagctggcgtctgattagttagtgggtggggtaacggcctaccaagacgatgatcagtagccggactgagaggttaatcggcaacatagggactgagataaggcccaaactcctacgggaggcagcagtagggaatattgcgaaatggaggaaactcggacgacgtggagacgcgtgcaggaagaaggttttcggattgtaaactgctttagatagggaagagaaaaatgacggtacctatagaataagctccggctaactac

SEQ ID NO: 10207 - DNA, 415 bp, unidentified
  misc_feature 1..415: note = Ascusbbf_1325171, encodes 16S rRNA
  source 1..415: mol_type = genomic DNA
agagtttgatcctggctcaggataaacgttggcggcgcacataagacatgccagtcgaacgaacttaatcgaaagtttacttttgaagcggttagtggcggactggtgagtaacgcgtaagcaatctgcctatcagaggggaataacagtgagaaatcattgctaataccgcataagctgtgagtatcgcatgatacaaatagaaaaggagcaatccgctgatagatgagtacgcgtctgattagttcgttggtgaggtgacgggaatatagcgcaatggagggtacccggacgcagtgacgccgcgtgcaggaagaaggttttcggattgtaaactgctttagatagggaagaaaaaaatgacggtacctatagaataagctccggctaactacgtgccagcagccgcggtaat

SEQ ID NO: 10208 - DNA, 488 bp, unidentified
  misc_feature 1..488: note = Ascusbbf_1372622, encodes 16S rRNA
  source 1..488: mol_type = genomic DNA
agagtttgatcctggctcagaacgaacgctggcggcaggcttaacacatgcaagttgagcgggattaattgatagcttgctattaattatgagagcagcgcactggtgagtaacacgtgggaacataccttttggtgggggacaacagttggaaacgactgctaataccgcataagccctaagggggaaagattaattgccgaaagattggcccgcggaagattaggtagtaggtggggtaacggcctacctagccgacgatctatagctggtctgagaggacgatcagcctcattggaacctgggcaccggtcagggtcctaccggggggagtagtggagaaattttggcaatgaaggcaactctgacccagccatgccgcgtgagtgaagaaggttttcggattgtaaagctctttcagacgggaagatgatgacggtaccgtcagaagaagcaccggctaacttcgtgtcagcagccgcggtaat

SEQ ID NO: 10209 - DNA, 353 bp, unidentified
  misc_feature 1..353: note = Ascusbbf_1325310, encodes 16S rRNA
  source 1..353: mol_type = genomic DNA
agagtttgatcctggctcaggatgaacgctggcggcgtgcctaacacatgcaagtcgaacgaagcaccttttcacgatcccttcggggtgacgagattgtgacttagtggcggacgggtgagtaacgcgtggggaacccgccctgtactgggggatagcgactggcaacggtcgttactaccgcataagcgcaggccataacatggtgaagtgtgcaatggtcgaatgctagatgatgcgaccgcgtctgagtggcgaagtatttcggtatgtaaagccctatcagcagggaagaaattgacggtacctgactaagaagctccggttaaatacgtgccagcagccgcggtaat

SEQ ID NO: 10210 - DNA, 490 bp, unidentified
  misc_feature 1..490: note = Ascusbbf_1325155, encodes 16S rRNA
  source 1..490: mol_type = genomic DNA
agagtttgatcctggctcagaacgaacgctggcggcaggcttaacacatgcaagttggacgggaatcgattgatagcttgctattgattgaggagagtagcgcacgggtgagtaacacgtgggaacataccttatagtgggggataacaattggaaacgattgataataccccataagtcctattggagaaagaagcaattcgctctacgattggcccgcggaagattaggcggttgttggggtaaaggcctaccaaacctacggtctatagctggtatgagaggacgatcagccacatttggactacgagacggcccagacaccaacgggaggcagcagtgaggagtattaggcaatgggggcaaccctgacccagccatgccgcgtgagtgaagaaggttttcgaattgtaaagctctgtcggatgtgaagatgatgacggtagcatctaaagaagccccggcaaacgtcgtgccagcagccgcggta

SEQ ID NO: 10211 - DNA, 490 bp, unidentified
  misc_feature 1..490: note = Ascusbbf_1325311, encodes 16S rRNA
  source 1..490: mol_type = genomic DNA
agagtttgatcctggctcaggataaacgctggcggcgcacataagacatgcaagtcgaacggacttaactcattcttaacgattgagagcggttagtggcggactggtgagtaatgtataagtaacctgcctatcagaggggaacaaccgctggaaacgactgctaataccgcatatgccacgagaatcacatggttcaagtgggaaaggagcaatccgctgatagatggacttatatgtgattagctagttggtggggtaacggcctaccaaggggacgaacagtagccggactgggaggttaaacagcgacaaagggactgcggtacggcgcagagtccaacgggaggcagcggtcgggaatattacgcaatggaggaaactctgacgcagtgacgccgcgtgcaggaagaaggttttcggattgtaaactgctttagacagggaagaaaaaagacagtacctgtagaataagctccggctaactacg

SEQ ID NO: 10212 - DNA, 490 bp, unidentified
  misc_feature 1..490: note = Ascusbbf_1342493, encodes 16S rRNA
  source 1..490: mol_type = genomic DNA
agagtttgatcatggctcaggacgaacgctggcggcgtgcctaacacatgcaagtcgaacgaggtccatgcagtggcaacactgcggaagacctagtggcgaacgggtgagtaacccgtgaggaacctgccccgaagaccgggataaccctccgaaaggagagctaataccggatacccccatcaggtggcatgatttgatgaggaaatggattccgcttcgggagggcctcggggcatatcatctagtgggtgggggaacggcctaccaaggcattgactggtggctggtctgagaggtggatcggcaaaactgggactggaaaccgccccagattcctccggagggaagcagaggggaatctggcgcaatgggcgaaagcctgaggcagcaacgccgcgggggggatgaaggctttcgggttgtaaacccctttcagcagggacgaatcaagacggtacctgcagaagaagccccggctaactacgtg

SEQ ID NO: 10213 - DNA, 486 bp, unidentified
  misc_feature 1..486: note = Ascusbbf_1325116, encodes 16S rRNA
  source 1..486: mol_type = genomic DNA
agagtttgatcctggctcagaacgaacgctggcggcaggtcttaggcatgcaagtcgaacggacgccagagtggcttgccattctgaagctagtggcgcacgagtgagtaacgcgtgggaaactgcccttcactggggaataacccctggaaacggacgctaataacccatacgcccgcaaggggaaagatttatcgctgatggatgtccccgcgttggattggagtgttagtcgggtaatggcctacccaggcgatgaaccatagctggcatgagaggacgatcatccacgctggaactaagacacggtccagcctcctacaggaggcagcagctaggaatatgaagcaatggaggaaactctgacacagccatgccgcgtgaatgaaaaaggccttcgggttgtaaagttcttgtggtcataaagatgatgacagtagtgacagaaaaagcaccggctaacttcgtgccagcagccgcggtaat

SEQ ID NO: 10214 - DNA, 490 bp, unidentified
  misc_feature 1..490: note = Ascusbbf_1372649, encodes 16S rRNA
  source 1..490: mol_type = genomic DNA
agagtttgatcctggctcagaacgaacgctggcggcaggcttaacacatgcaagttggacgggaatcgattgatagcttgctattgattgaggagagtagcgcacgggtgagtaacacgtgggaacataccttatagtgggggataacaattggaaactattgcttataccgcttacgtcgtaagggtgaatggagaatttcggtctctgatttgcggggggaagattaggcagttggtggggtaaagtcctaccaaacctacggtctatagctggtctgagaggacgatcagccacattgggactgagacacggcccaaactcctacgtgaggcagcagtggggaatattgggcaatgggggcaaccctgacccagccatgccgcgtgagtgaagaaggttttcgaagtgtaaagctctttcggatgtgaagatgatgacggtagcatctagagaagccccggcaaacttcgtgccagcagccgcggta

SEQ ID NO: 10215 - DNA, 490 bp, unidentified
  misc_feature 1..490: note = Ascusbbf_1325274, encodes 16S rRNA
  source 1..490: mol_type = genomic DNA
agagtttgatcctggctcaggatgaacgctagcggcaggcttaacgcatgcaagtcgaggggcagcgcggggtagcaatactctggcggcgaccggcggaagggtgcgtaacgcgtgagcaacttgcccgtcactggaggataggcactggaaacggtgtgtaatactccataacataagttttcgcatgaagatttattgaaagattcattggtgacggatgggctcgcgagacattagctagtcggcggggtaacggcccaccgaggctacgatgtctaggggttctgagaggaaggtccacaacacgggaactgggacacggtccagactcctacgggaggaagcagtgaggagtagtggtaaatgggcggaagcctgaaccagccatgccgagtgaaagaataaggccctatgggtcgtaaacttcttttccttgagggcaataaggatcacgcgtggtccgatgagagtatcaggggaataagca

SEQ ID NO: 10216 - DNA, 490 bp, unidentified
  misc_feature 1..490: note = Ascusbbf_1324949, encodes 16S rRNA
  source 1..490: mol_type = genomic DNA
agagtttatcctggctcaggatgaacgctagcggcaggactaagacaggcaagtcgaacgggaaaggtcccgtcggggatatgagagtggcgcacgggggcggaacgcgtatgcaacccacccgctggcgggggatagcccggagaaaggcgaatgaataccccatgaggagacaggacggcatcgtcctgttttcaaaactacggtgacggcggacgggcatgcatgccattagatagttggcggggtaacggcccaccaagtcgacgagggccaggggatcggagaggacggtccccccaccgcgtactggaccccggcccagactcctacgggaggcagcagtaccggatattgggcaatggggggaaccctgaaccagccatgccgcgtgagggattaaggccctacgggtcgtaaacctcttttgccgggggataaagacagcctcgtgaggttgtttgaaggtacccggagaataagcatcggc

SEQ ID NO: 10217 - DNA, 490 bp, unidentified
  misc_feature 1..490: note = Ascusbbf_1341824, encodes 16S rRNA
  source 1..490: mol_type = genomic DNA
agagtttgatcctggctcaggatgaacgctagctacaggcttaacacatgcaagtcgaggggcagcgtatcgcacgcttgcttttgatgatggcgaccggcgcacggctgggtaacgcgtttcccaccttccctatattagcgtatagcccggcgtctgtcggcttatatctctttgttcttgggagaagacatctgaaatgaagcaatggtttaccggcatagggtcggcatgcgtctgcttaggttggtggcgggaaaacggctcaccaagtacccgatcagtaggggttctgtgagacaaggccctaacagggggactgggcaacgggcgaaacacctacgggacagagcagtgaggaatattggtgaatggacgagagcctgaagcaggcaagtagcgtgcaggaagacggcccgaggggtggcaaactgctggtagtcagggacaaagtacactacggaaggtattttgtaggtaccggaagaag

SEQ ID NO: 10218 - DNA, 490 bp, unidentified
  misc_feature 1..490: note = Ascusbbf_1377776, encodes 16S rRNA
  source 1..490: mol_type = genomic DNA
agagtttgatcatggctcaggataaacgctggcggcgcacataagacatgcaagtcgaacggacttaactcattcttaacgattgagagcggttagtggcggactggtgagtaatatataagtaacctgcctctcagaggggaacaacagttggaaacgactgctaataccgcatatgccacgagcatcacatggttcaagtgggaaaggagcaatccgctgatagataggcttatatctgattagctagttggtggggtaacggccaaacaaggcgacgatcagtagccggcctgagaggttaaacggcacagtggggactgagatacggaccataatccgacgggaggcagcaggcgggaatatggcgcaagggaggaaactcggacgcagtgacgccgcgtgcaggaagaaggttttcggagtgtaaactgctttagacagggaagaaaaaagacagaacctgtagaataggctcgggctaactacg

SEQ ID NO: 10219 - DNA, 490 bp, unidentified
  misc_feature 1..490: note = Ascusbbf_1324948, encodes 16S rRNA
  source 1..490: mol_type = genomic DNA
agagtttgatcctggctcaggatgaacgctagcggcagtcttaaccccttcccttctcggggtcacgcggggtagcactcctctggcgacgaccggcgcacgggttcttccctcttcttccccctccctgtacccttggtataacggagagaaatttcccctactcccccatattgttcttctttctcattgtaggataacgaaagcttcggtggttacggatgggcatgcgtgaccttagctagttggtaaggtaacggcttaccaaggtgacgatgtctaggggagctgagaggcttatccaccagacgggcacggagacacggaccagcatcctccgggtggaagcggttaggaatattggtcaatggacggaagtctgaaccagccgtgccgcgtggaggaagaaggtcccatgggttgtaaactccttttgttcgagagtaataagggctttgcgaagcccgatgagagtatcggacgaataagc

SEQ ID NO: 10220 - DNA, 490 bp, unidentified
  misc_feature 1..490: note = Ascusbbf_1325266, encodes 16S rRNA
  source 1..490: mol_type = genomic DNA
agagtttgatctggctcaggatgaacgctagctacaggcttaacacatgcaagtcgaggggcagcataacgaaagcttgcttttgttgatggcgaccggcgcacgggtgagtaacgcgtatccaaccttccccttagtagggcatagcccggcgaaagtcggattaataccctatgttttccgttgaggacatctgaagtggaacaaagatttatcgctaagggatggggatgcgtctgattaggttgttggcggggtaacggccaaccaagccatcgatcagtaggggttctgagaggaatgtcccacacgtatggagtgacagacggaccaagctcgtacgggaggagggagtgaggatgattgatcgatggacgaaggactgaaccagccaagttgcgtgcaggaggacgtccggatgggttgtaaactgctattgcaggaagataaagtgtgagacgagtccctttttgtatgtaccatgtgaata

SEQ ID NO: 10221 - DNA, 490 bp, unidentified
  misc_feature 1..490: note = Ascusbbf_1342440, encodes 16S rRNA
  source 1..490: mol_type = genomic DNA
agagtttgatcatggctcaggacgaacgctggcggcatgcttaacacatgcaagtcgaagggacggatgaaggagggatgaaaggtaggggtgaaggggggaggaatgtatgagcaaactgcatgtgagaatgggataaaagggggaaaagagggagaagaggggataagaccacggcaccgcatggtgctgcggtaaaagatttttcgggcagagatgggctcatatcccattagctagttggtgagctaatagccaaccaagccgacgatgggtagccgagctgagaggctgatcggcacccttgggactgaaacacggcccagaacactacgggaggcagcagtggggaatattgggcaatggaggaaactctgagccagcaatgccgcgtgagcgatgaaggtaattttattgtaaagctcgtttctcaggaacgaataaagatgacggtacctgaggaataagccccggctaactacgtgccagc

SEQ ID NO: 10222 - DNA, 490 bp, unidentified
  misc_feature 1..490: note = Ascusbbf_1342464, encodes 16S rRNA
  source 1..490: mol_type = genomic DNA
agagtttgatcatggctcaggatgaacgctagcggcaggcttaacacatgcaagtcgaggggcagcgcggcgtagccatactctggcggcgagcggcggacgcacgcgtaaggcgtgagtatcttgcccgccactgggtggtaggtaccggaacgagtgtgtaatactccatatcttatggatactgatggctttttattgaaagcttcgtttgtgacggatgggttggcgtaacatcagatagtcggcggggtagcggcccaccgagcctacgatacgtaggggatctgtgaggaaggtcccccacactggacctgggacacggtccaaactcctacgggaggcagcagtgaggaatattggtcaatgggcggaagcctgaaccagccaagccgcgtgcaggaagaaggccctatgggtcgtaaactgcttttccacgagggcaataagggtcacgtgtggccctatgtgagtatcggatgaataagca

SEQ ID NO: 10223 - DNA, 490 bp, unidentified
  misc_feature 1..490: note = Ascusbbf_1445551, encodes 16S rRNA
  source 1..490: mol_type = genomic DNA
agagtttgatcatggctcaggatgaacgctagcggcaggcttaacacatgcaagtcgaggggtaacgcggggtagcaatactctggcgacgaccggcgcacgggtgcgtaacgcgtatgcaacctacctgtaacaggggtataacggagagaaatttccactaatcccccctattgttagagattcgcatgtttctctaacgaaagcttcggtggttacggtagggcgtgcgtgagattagctaggtggtagggtaacggcttaccaaggcgacgatgtctaggggggctgagaggctgatccccaacactggaactgagacacggaccagactcctacgggaggcagcagtgaggaatattggtcaatggacgagagtctgaaccagccatgccgcgtggaggaagaaggtcctatgggttgtaaactccttttgtgcgggagtaataagaggctcgcgagcctggatgagagtatcggatgaataagc

SEQ ID NO: 10224 - DNA, 490 bp, unidentified
  misc_feature 1..490: note = Ascusbbf_1342452, encodes 16S rRNA
  source 1..490: mol_type = genomic DNA
agagtttgatcatggctcaggatgaacgctagctacaggcttaacacatgcaagtcgcggggcatcatggcatgtagcaatacatgctgatggcgaccggcggatgggtgagtaacgcgtatccaacctggccctatctcgggtacagcccctcgaaagagggattaattcccgatgttccctgggatccgcacgttttccagggcaaaggcatttgtcggatagggatggggatgcgttccattaggcagtcggcggggtaacggcccaccgagcctacgatggataggggttctgaggggaaaggccccgcaaactgggactgagaacaggcccggacgcgtacggggggcagcagtgaggaatagtggtcaatggcggtaacgctgaaccagccaagtagcgtgagggattacggccctatgggttttaaacctcttttgttagggagcaaccggtggcactagggcaattctgcgagtacctttcg

SEQ ID NO: 10225 - DNA, 490 bp, unidentified
  misc_feature 1..490: note = Ascusbbf_1373048, encodes 16S rRNA
  source 1..490: mol_type = genomic DNA
agagtttgatcctggctcaggataaacgctggctgcgcacataagacatgcaagtcgaacgaacttaatcgaaagtttacttttgaattgggtagtggcggactggtgagtaacgcgtaaacaatctgcctttcagagaggaataacagtgagaaatcattgctaataccgcatcagctgtgagtatcgcatgatacaaatagaaaaggagcaatccgctgttagatgagcttgcgtctgattagttagttggtgtggtaacggactacccagacgatgatcaggagccggactgagagggtaagaggccacggtgggaactagatacggcccaagcacctacgagaggcagcagacgggaatattgcgcaatggaggaaactctgacgcagtgacgccgcgtgcaggaagaaggttgtcggattgtaaaatgctttagatagggaagaaaaaaaatgacggtacctatagaataagctccggctaacta

SEQ ID NO: 10226 - DNA, 490 bp, unidentified
  misc_feature 1..490: note = Ascusbbf_1322023, encodes 16S rRNA
  source 1..490: mol_type = genomic DNA
agagtttgatcatggctcaggacgaacgctggcggcatgcttaacacatgcaagtcgaacggactgattccttcgggttgcaagttagtggcgaacgggtgagtaatgtatgatcaacctgcctctatcaacgggataacagttggaaacgactgctaatacggtataagaccacggccccgcctgatgctgcggtaaaagatttttcggctaggaatgggctcatttcccattagctagttggtaggataacagcccaccaaggcgacgattggtagccgagcgtagaggctgatcggccacatagggacggaaacacggcccagactcctacgggaggcagcagtggggaagaatgggcaatggaggcaactctgacccagcaatgccgcgtgagtgatgaaggtaattttattgtaaagctcgtttctcaggaacgaataaagatgacggtacctgaggaataagccccggctaactacgtgccagc

SEQ ID NO: 10227 - DNA, 490 bp, unidentified
  misc_feature 1..490: note = Ascusbbf_1340749, encodes 16S rRNA
  source 1..490: mol_type = genomic DNA
agagtttgatcctggctcaggatgaacgctagcggcaggcttaacacatgcaagtcgaggggtaacgcggggtagcaatactctggcgactaccggcgcacgggtgcgtaacgcgtatgcaacctacctttaacaggggtataacggagagaaatttccactaatcccccatattgttattctttcgcatgttaggataacgaaagcttcggtggttacggatgggcatgcgtgacgttagctagttggtaaggtaacggcttaccaaggcgacgatgtctaggggagctgagaggcgtatcccacacacgggaacggagaaacggacaagactccaacgggaggcagcagtggggaatattggtcatggacggaagtcggaaccagccatgccgcgtggaggaagaaggtccgatgggtgggaaactccttttgttcgagagtaataagaggatggcgagcctcgatgagagtatcggacgaataagca

SEQ ID NO: 10228 - DNA, 490 bp, unidentified
  misc_feature 1..490: note = Ascusbbf_1322009, encodes 16S rRNA
  source 1..490: mol_type = genomic DNA
agagtttgatcctggctcaggacgaacgctggcggcatgcttaacacatgcaagtcgaacggactgattccttcgggatgaaagttagtggcgaacgggtgagtaatgtatgagcaacctgcctctatcaacgggataacagttggaaacgactgctaatacggtataagaccacggcaccgcatgatgctgcggtaaaagccttttcggagagagatgggctcatatcccattagctagttggtgagataacagcccaccagggcgacgatgggtagccgagctgagaggctgatcggccacattgggcagaaaacacggcgcagactcctacgggaggcagcagtggggaagattgggcaagggcggcaactctgaccccgcaatgccgcgtgggtgatgaaggtaattttattgtaaagctcttttctcaggaacgaataaagatgacggtacctgaggaataagccccggctaactacgtgccagc

SEQ ID NO: 10229 - DNA, 470 bp, unidentified
  misc_feature 1..470: note = Ascusbbf_1322013, encodes 16S rRNA
  source 1..470: mol_type = genomic DNA
agagtttgatcatggctcagaacgaacgctggcggcatgcctaacacatgcaagtcgaacgagaccgtcgggtcgagtggcgcacgggtgcggaacgcgggggaaccggcccttaggttcggaagaactcaccgaaaggggggcgaagaccggagaatgtcttcggaccaaagagtgatcgcctttggaggggcccgcgttggatgagcgagttggggaggtaaaggcgcaccaaggcgacgatccagagctggtcgtagaggaggatcagccacactgggactgagacacggcccagactcctccggggggcagccgtggggcctcttggccactgggcgaccgcctgctcccgccctgccgcgtgagtgatgacggccttagggttgtacagctcttttaccagggatgataatgaccgtacctggagactacgctccggctacctccgtgccagcagccgcggtaat

SEQ ID NO: 10230 - DNA, 470 bp, unidentified
  misc_feature 1..470: note = Ascusbbf_1322010, encodes 16S rRNA
  source 1..470: mol_type = genomic DNA
agagtttgatcctggctcagaacgaacgctggcggcaggcttaacacatgcaagtcgagcgcccttttcggagggagcggcagacgggtgagtaacgcgggggaatctacccatctctacggaataactcagtgaaacttgtgctaataccgtatacgcccttttggggaaagatttatcggagatgactgagcccgcgttgacttagccacttggcggggtagaggccaaccaaggagacgatctatagctggtctgagaggatgatcagccacactgggactgagacacggcgcagacacgtacgggaggcagcggaggggaatagtagataggcggcgcacgcgtagaacagcgtcgccgtgtgagggatgaaggccctagaggtgtaaagctcgttcaacggtgaagataatgacggtaaccgtagaagaagcaccggctaacttcgtgccagcagccgcggtaat

SEQ ID NO: 10231 - DNA, 490 bp, unidentified
  misc_feature 1..490: note = Ascusbbf_1434924, encodes 16S rRNA
  source 1..490: mol_type = genomic DNA
agagtttgatcctggctcaggataaacgctggcggcgcacataagacgtgcaagtcgaacgaacttaatcgaaagtttacttttgtagcggttagtggcggactggtgagtaacgcgtaagcaatctgcctctcagaggggaataatagtgagaaatccttgctaataccgcataagctgtgagtatcgcgtgatacacatagaaaacgaacattccactgttagatgagcttgcgtctggttagttagttggtggggtgacggcctaccaagacgatgatcagtagccggactgagaggttaaacggcaacattgggacacagcaacggaccagacgccaacgggaggcagcagtcgggaagattgcgcaatggaggaaacgcggacgcagtgacgccgcgtgcaggaagaaggttgtcggattgtaaactgctttagatagggaagaaaaaaatgacggtaccgatagaataagcaccggctaactac

SEQ ID NO: 10232 - DNA, 490 bp, unidentified
  misc_feature 1..490: note = Ascusbbf_1372965, encodes 16S rRNA
  source 1..490: mol_type = genomic DNA
agagtttgatcatggctcaggatgaacgctagctacaggcttaacacatgcaagtcgcggggcatcgcgaagggtagcaatactctttggcggcgaccggcggatgggtgagtaacgcgtatccaacctggcctatctcgggcacagcccctcgaaagagggattaattcccgatgttcccgttagttcgcatgttctttcgggcaaaggtatttatcggatagggatggggatgcgttccattaggcagtcggcggggtaacggcccaccgagcctacgatggataggggttctgagaggaaggccccccaaccgggaatgagaacagggccagaagtccaacgggaggaagcagggaggaatagtggaaaatggcggtaaggcggaaccagccaagtagcgtgggggattacggccctatgggttgtaaactgcttttatatagggataaagtgatctacgtgtaggttttggtaggtactatatgaa

SEQ ID NO: 10233 - DNA, 490 bp, unidentified
  misc_feature 1..490: note = Ascusbbf_1340740, encodes 16S rRNA
  source 1..490: mol_type = genomic DNA
agagttgatcatggctcaggacgaacgctggcggcgtgcctaacacatgcaagtcgaacggggattttgtttcggcagaatcctagtggcgaacgggtgagtaacgcgtaggcaacctgccccccggattgggacaacaccccgaaaggggtgctaataccggatacgaagataataccgcatggtgttattttgaaagatgtcctctatttataagctatcgccgggtgatgggcctacgtccgattagctggttggttgggtaacggcctaccaaggcgacgaacggtagccggtttgagtgacgaaacggcagcctgcggaccgagacacggcccagacacctacgggaggcagcaggggggaatctgccgcaatgggcgaaagcctgacggagcaacgccgcgtgggtgaggaagttcgtcggaacgtaaggcccggttgtacatgacgaacgtgctttctatcaacaacgggaagcaatgacggt

SEQ ID NO: 10234 - DNA, 486 bp, unidentified
  misc_feature 1..486: note = Ascusbbf_1373044, encodes 16S rRNA
  source 1..486: mol_type = genomic DNA
agagtttgatcatggctcagaacgaacgctggcggcaggtcttaggcatgcaagtcgaacggacgacagagtggcttgccattctgcagttagtggcgcacgagtgagtaacgcgtgtgaaactgcccttcactggggaataacgtctggaaacggacgctactaccgcatccgccctcacggggcaagatttatcggttgtggtttggcccgcgttggattcgctttttggtggggtaatggcctcccaaggcgatgatccttagctgttcttggatgacgatcagccacgctggaaatgagacacggtccagactccgacgggaggcagcagctaagaatattgggcaatggaggaaactctgacctagccatgccgcgtgaatgaagaaggccttcgggttggaaagttctttgagtcatgaagatgatgacagtagtgacagaaaaagcaccggctaacttcgtgccagcagccgcggtaat

SEQ ID NO: 10235 - DNA, 490 bp, unidentified
  misc_feature 1..490: note = Ascusbbf_1434950, encodes 16S rRNA
  source 1..490: mol_type = genomic DNA
agagtttgatcctggctcaggatgaacgctagcggcaggcttaacacatgcaagtcgaggggtaacgcggggtagcaatactctggcgacgaccggcgcacgggtgcgtaacgcgtatgcaacctacctgtaacaggggtataacggagagaaatttccactaatcccccatattgttattctttcgcatgttaggataacgaaagcttcggtggttacggatgggcatgcgtgacattagctattaggtaaggtaacggcttaccaaggctacgatgtctagggtatctgagaggggtatccgcaacacaggaaaggagacaccgaccacacacctacgggaggcagcagggaggaatattggtcaatggaaggaagtctgaaccagccatggcgcgtggaggaagaagggcctatgggttgtaaactccttttgtacgagagtaataagggcttagcgaagccagatgagagtagcggacgaataagc

SEQ ID NO: 10236 - DNA, 490 bp, unidentified
  misc_feature 1..490: note = Ascusbbf_1340728, encodes 16S rRNA
  source 1..490: mol_type = genomic DNA
agagtttgatcatggctcaggatgaacgctagcggcaggcttaacacatgcaagtcgaggggtaacgcggggtagaaataatttggagaagaaagggggaagggggcgtaacgcgtaggtaatagagagggaataggggtagaaaggagagaaatttccactaagcccccatattgttattctttcgcatgttaggataacgaaagcttcggtggttacggatgggcatgcgtgacattagctagttggtaaggtaacggcttaccaaggcgacgatgtctaggggagctgagaggcttatcccacgaactgtgactgagacacggaccagactcctacgggaggcagcagtgaggaatattggtcaatggacggaagtctgaaccagccatgccgcgtggaggaagaagggcctatgggttgtaaactccttttgttcgagagtaataagaggcttgcgagcctcgatgagagtatcggacgaataagc

SEQ ID NO: 10237 - DNA, 490 bp, unidentified
  misc_feature 1..490: note = Ascusbbf_1372853, encodes 16S rRNA
  source 1..490: mol_type = genomic DNA
agagtttgatcatggctcaggatgaacgctagcggcaggcttaacacatgcaagtcgaggggcagcgcggggtagcaatactctggcggcgaccggcggaagggtgcgtaacgcgtgagcaacatgcccgtggcagggggataagcgatggaaacgtcgtctaagaccccgtaacaacagacctcgcatggggtttgtttgaaagcttcggcggccacggattggctcgcgtcccattaggcagttggcggggtaacggcccaccaaaccgacgatgggtaggggttctgagaggaaggtcccccacagtgaaacagggacacggtcccaatccttccggagggaggcgttgaggaaacttggtcaaggggcggagccctaaaccagccaggccgcgttcaggaataaggccctacgggtcgtaaactgcttttgtacgggagcaataagggtcacgagtggcctgaagagagtaccgtacgaataagca

SEQ ID NO: 10238 - DNA, 490 bp, unidentified
  misc_feature 1..490: note = Ascusbbf_1322220, encodes 16S rRNA
  source 1..490: mol_type = genomic DNA
agagtttgatcctggctcaggatgaacgctagcggcaggcttaacacatgcaagtcgaggggtaacgcggggtagcactactctgtcgacgaccgtcgcacgggtgcgtagcgcgtatgcaacctacctgtaacaggggtataacggagagaaatttccactcatcccccatattgttagagattcgcatgtttctctaacgaacgcttcgttggttactgatggtcatgcgtgacattagctagttggtaaggtaacggcttaccaaggcgactctgtctagtggagctgggaggcttatcaccagcactggtacggagacacggaccagactcctacgggaggcagcagtgaggaatagtgggcaatggacggaagtctgaaccagccatgcagcgtggaggaagaaggtcctatgggttgtaaactccttttgttcgagagtaagaagaggcgtgcgagcctcgatgagagtatcggacgaataagc

SEQ ID NO: 10239 - DNA, 490 bp, unidentified
  misc_feature 1..490: note = Ascusbbf_1341102, encodes 16S rRNA
  source 1..490: mol_type = genomic DNA
agagtttgatcatggctcaggacgaacgctggcggcatgcttcacacatgcaagtcgaacggactgattccttcgggatgaaatttcttatcgaacgggtgagtaatgtatgagcaacctgcctctgtcaacggtataacagttgtaaacgactgctaatacggtataagaccacggcaccgcatggtgctgcggtaaaagttttttcggacatcgatgggctcatatcccattagctagttggtgagataatagcccaccaaggcgacgatgggtagccgagctgagaggctgatcggccacattgggactgaaacacggcccagactcctacgggaggcagcagtggggaagattgggcaatggaggaaacgctgacccagcaatgccgcgtgagcgatgaaggtaattttattgtaaagcgcgtttctcaggaacgaataaagatgacggtacctgaggaataagccccggctaactacgtgccagc

SEQ ID NO: 10240 - DNA, 490 bp, unidentified
  misc_feature 1..490: note = Ascusbbf_1322142, encodes 16S rRNA
  source 1..490: mol_type = genomic DNA
agagtttgatcctggctcaggatgaacgctggcggcgtgcttaacacatgcaagtcgaacgaggtacaaggacggatgttttcggacggaagatcttgtactgagtggcggacgggtgagtaacgcgtgggaaacctgccctgttccgggggataccagttggaaacgactgttaataccgcataagcgcacagcaccgtatggcgcagtgtgaaaacatccggaggaataggatggtccagcgtctgattagggagtaggcagggtaacggcctacgaaaccgacgatcagtagccggcctgagatagtgcacagccacatagggacggaggcacgacccaaaatcctacagggggcggcagtcgggagtattgcacaaggggggaaaaccagatgcagcgacgccgcgagagggaagaggtatttcagtatgtaaagctctggcagcagggaagaagatgacggtacctgcaaaagcagccccggcta

SEQ ID NO: 10241 - DNA, 490 bp, unidentified
  misc_feature 1..490: note = Ascusbbf_1373031, encodes 16S rRNA
  source 1..490: mol_type = genomic DNA
agagtttgatcctggctcaggatgaacgctagcggcaggcttaacacatgcaagtcgaggggcaacgcggggtagcaatactctggcgacgaccggcccacgggtgcgtaacgcgtatgtaacctacctgtaacaggggtataacggagagaaatttacactaatcccccatattgttattctttcgcatgctaggataaagaacgcttcggtggctacggttgggcatgcgtgacattagttagttggtaaggtaacggcttaccaagccgacgatgtctaggggagctgagaggcttatcccccacactggaactgagacacggaccaaactcctacgggaggcagcagtgaggaatattggtcaatggacgtaaggctgaaccagccatgccgcgtgggggaataaggtcctatgggttgtaaactccttttgttcgggagtaataagggctttgcgaagcccgatgagagtatcggacgaataagc

SEQ ID NO: 10242 - DNA, 490 bp, unidentified
  misc_feature 1..490: note = Ascusbbf_1373020, encodes 16S rRNA
  source 1..490: mol_type = genomic DNA
agagtttgatcctggctcaggatgaacgctagctacaggcttaacacatgcaagtcgaggggcagcataacgaaagcttgcttttgttgatggcgaccggcgcacgggtgagtaccgcgtctccaaccttccccttagtagggcatagcccggtgaaagtcggattaataccctatgttttccgtttaggacatctgaagtgtaacaaagatttatcgctaagggatggggctccgtctgtttaggttgttggcgggtaaacggcccaccaagccatagatcaatagggggtctgagaggaaggtcccgcgcagtgggaccgagaaacggaccaaactcctacgggaggcagcagtgaggaatattggtcaatgggcgagagcctgaaccagccaagtagcgtgcaggatgacggccctatgggttgtaaactgcttttgcatgggaataaagtgagggacgtgtccctttttgtatgtaccatgagaat

SEQ ID NO: 10243 - DNA, 490 bp, unidentified
  misc_feature 1..490: note = Ascusbbf_1373027, encodes 16S rRNA
  source 1..490: mol_type = genomic DNA
agagtttgatcatggctcaggatgaacgctagctacaggcttaacacatgcaagtcgaggggcagcataacgaaatcttgcttttgttgatggcgaccggcgcacgggtgagtaacgcgtatccaaccttccccttagtagggcatagcccggcgaaagtcggattaataccctatgttttccgttgaggacatctgacgtggaataaagatttatcgctacgggatggggttgcgtctgtttgggttgttgtaggggtaacggcccaccaagccatcgatcagtagtggttctgtgaggaaggtaccccgaactggtacggagacacggaccaaactcgtacgggaggcagcagtgaggaagactggtcaatgggcgagagcctgaaccagccaagtagcgggcaggatgacggccctatgggttgtaaactgcttttgcatgggaataaagtgagggaagtgtccctttttgtatgtaccatgagaat

SEQ ID NO: 10244 - DNA, 490 bp, unidentified
  misc_feature 1..490: note = Ascusbbf_1435063, encodes 16S rRNA
  source 1..490: mol_type = genomic DNA
agagtttgatcctggctcaggatgaacgctagctacatgcttaacacatgcaagtcgaggggaaacgatatcgaaagcttccttttgatcggcgtcgaccggcgcacgggtgagttacgcgtctcccacctgcctgtaaattgggcataatccgtggtaacgcggcctaatgtcctatgtgctccgaataggacatcttttttggagtaaagattcatcgtttccggatggggatgcgtctgcttggcttgctggctgggttaagaccccccagggcgacgatcagtaggggttcttagagtaaggtcaacgacattggaaatgagacacaatccaaactgctacggggagcaaaagagaggaatattgggcaatggacgagaatctgaaccagccgagtggcgtgcaggatgacggccgtatgggttgtaaagtggttatatgcggggataaagtgagcaacgcatggtgtattgcaggtaccgcaaga

SEQ ID NO: 10245 - DNA, 490 bp, unidentified
  misc_feature 1..490: note = Ascusbbf_1340762, encodes 16S rRNA
  source 1..490: mol_type = genomic DNA
agagtttgatcctggctcaggatgaacgctagcggcaggcttaacacatgcaagtcgcggggtaacgcggggtatcaatactctggcgacgaccggcgcacgggtgcgtaacgcttatgcaacctacctgtaacaggggtataacggagagaaattttcactaatcccccatattgttagagattcgcatgtttctctaacgaaagcttcagtggttccgtatgggcctgcgtaacattagctagttggtaagttaacggcttacaacggcgactatgtctaggggagctgatacgcttatcccacacactgggactgagacacggaccagactcctacgggaggcagcagtgaggaatagtggtcaatggacggaagtctgaaccggccatgccgcgtggaggaagaaggtcctatgggttgtaaactccttttgttcgagagtaataagaggcttgcgagcctcgatgagagtatcggacgaataagc

SEQ ID NO: 10246 - DNA, 490 bp, unidentified
  misc_feature 1..490: note = Ascusbbf_1372861, encodes 16S rRNA
  source 1..490: mol_type = genomic DNA
agagtttgatcctggctcaggatgaacgctggctgcgggcttaacacatgcaagtcgaacggacttaactcattcttaacgtttgagagctgttgatggcggactggtgagtaatgtctaattaaccttcctatctgaggggaacaacagttggagacgactgctaataccgcatatgccacgataatcacagtgttcaagtgggaaaggagcaatccgctgataaatggacttctatctgtttagctagttggtggggtaacgccctaccaaggcgacgatcagtagccggactgagaggtgagacggcgacaatgggactgaggtacggaccagactgcaacgggaggcagcagtcgggaaaattgagcaatggaggagagtgcaacgcagtgacgctgcgtgaaggaagaaggttttcggattgtaaatgctttcgaaagggaagaaaaaagacagtacctgaagaataaggaccggctaactacgt

SEQ ID NO: 10247 - DNA, 490 bp, unidentified
  misc_feature 1..490: note = Ascusbbf_1435051, encodes 16S rRNA
  source 1..490: mol_type = genomic DNA
agagtttgatcctggctcagaatgaacgctagcgacaggcctaacacatgcaagtcgaggggcagcgcgggagaagcttgcttttcctggcggcgaccggcgcacgggtgcgtaacaggtgtgcaatctgtccatagtcggggaatagcccagcgaaagttggattaatgctccatgtgtcacgaagccgcattactttgtgatgaaacgtaaggacgatgggtgagcaggctgctgttgagatagttggtggggtaacggctcaccaagtcgacgatcagtagtggttctgagaggaaggccccccacatgggaccggagaaccggccaaatcccccacgggaggcagaaggaaggatgattggtcaatgggcgagggcctgaaccagccaagtcgcgtgaagaatgaaggttctagggattgaaaacttcttttgtccgagggtaaaaaggccacgtgtggcttcttgcaagtagtggacgaataagc

SEQ ID NO: 10248 - DNA, 490 bp, unidentified
  misc_feature 1..490: note = Ascusbbf_1436335, encodes 16S rRNA
  source 1..490: mol_type = genomic DNA
agagtttgatcatggctcaggatgaacgctagcggcaggcttgacacatgcaagtcgaggggcagcgcggggtagcaatactctggcggcgaccggcgggcgggtgcgtaacgcgtgcgcaacttgcccgtcactggggggtaggcactggaaacggtgtgtaatactcactaacatatggattcacatggatttatattgaaagattagttggtgccggatgggatcgagtaacattagatagtcgggggggtaacggccccccgaggctacgctgtttaggggttgtgagaggaaggtgccccacactggaactgaggcacggtccagactcctacgggaggcagcagtgaggaatattggtcaatgggcggaagcctgaaccagccatgccgcgtgcaggaataaggccctatgggtcgtaaactgcttttccttgagggcaataagggtcacgtgtggcccgatgagagtatcatgggaataagca

SEQ ID NO: 10249 - DNA, 490 bp, unidentified
  misc_feature 1..490: note = Ascusbbf_1341507, encodes 16S rRNA
  source 1..490: mol_type = genomic DNA
agagtttgatcctggctcaggataaacgctggcggcgcacataagacatgcaagtcgaacgaacttaatcgaaagtttacttttgaagcggttagtggcggactggtgagtaacgcgtaagcaatctgcctatcagaggggaataacagtgagaaatcattgctaataccgcataagctgtgagtatcgcatgatacaaatagaaaaggagcaatccgcttatagatgagcttgcgtctgattagttggtaggtggggtaacggcctaccaagactatgatcagtagccggactgagaggttatacggcccgattcggactgagatacggcccagactcctacgggagggagcagtcgggaacattgcgaaatggacgaaacgcggacgcagtgacgccgcgtgcaggaagaaggttttcggattgtaaactgcattagatagggaagaaaaaaatgacggtacctttagaataagctccggctaactac

SEQ ID NO: 10250 - DNA, 486 bp, unidentified
  misc_feature 1..486: note = Ascusbbf_1322360, encodes 16S rRNA
  source 1..486: mol_type = genomic DNA
agagtttgatcctggctcagaacgaacgctggcggcaggtcttaggcatgcaagtcgaacggacgactgagtggcttgccattctgaagttagtggggcacgagtgagtaacgcgtgggaaactgcccttcactggggaataacgtctggaaacggacgctaataccgcatacgcccgcaatgggaaagatttatatgtgatggatgtgcccgcgttggattagcttgttggttgggtaatggccgaccaaggcgatgatccatacatggtctgagaggacgatcagccacgctggaacttgtgcacgggccagactcgtacggaaggcaggagctaagaatattgggcaatggaggcaacgctgacccagccatgccacgtgaatgaagaaggccttcgggtgggaaagtacttttagtcatgaagatgatgacagtagtgacagaaaaagcaccggctaacttcgtgccagcagccgcggtaat

SEQ ID NO: 10251 - DNA, 490 bp, unidentified
  misc_feature 1..490: note = Ascusbbf_1340850, encodes 16S rRNA
  source 1..490: mol_type = genomic DNA
agagtttgatcctggctcaggatgaacgctagcggcaggcttaacacatgcaagtcgaggggtaacgcggggtagcaatactctggcgacgaccggcgcacgggtgcgtaacgcgtatgcaacctacctgtaacaggggtataacggagagaaatttccactaatcccccatattgttattctttcgcatgttaggataacgaaagcttcggtggttacggatgggcatgcgtgacattagctagttggtaaggtaacggcttaccaaggcgacgatgtctaggggagctgagaggcttatcgccaccgctgggactaacacacggaacggactcctaccgcaggcaggagtgcgtagggttggagaaggaacgaaagtcggaacctgccaggacgcgtgaaggaagaaggtcgtatgggttgtaaacgcctttgggtcgtgagtaataagggcatggcgaagcccgatgagagtaccggacgaagaagc

SEQ ID NO: 10252 - DNA, 490 bp, unidentified
  misc_feature 1..490: note = Ascusbbf_1322366, encodes 16S rRNA
  source 1..490: mol_type = genomic DNA
agagtttgatcctggctcaggatgaacgctagcggcaggcttaacacatgcaagtcgaggggtaacgcggggtagcaatactctggcgacgacctgcgcacgggtgcgttatgcgtatgccaccttcctgtaacaggggtataacggagacaaatttccactaatcccccatattgttattctttcgcatgttaggataacgaaagcttcggtagttacgcatgggcatgggtaacattagctagtgggaaaggaacgggcttaccaaggcgacgatgtctaggggagctgagaggcttatcccccacactggtactgagacacggaccagaatcctacgggaggcagcagtgaggaatattggtcaatggacggaagtctgaaccagccatgccgcgtggaggaagaaggtcctatgggttgtaaactccttttgttcgagaataataagggctttgcgaagcccgatgagagtaccgtacgaataagc

SEQ ID NO: 10253 - DNA, 490 bp, unidentified
  misc_feature 1..490: note = Ascusbbf_1371844, encodes 16S rRNA
  source 1..490: mol_type = genomic DNA
agagtttgatcatggctcaggatgaacgctagcggcaggcttaacacatgcaagtcgaggggtaacgcggggtagcattactctggcgacgaccggcgcacgggtgcgtaacgcgtatgcaacctacctgtaacaggggtataacggagagaaatttccactaatcccccatattgttattctttcgcatgttaggataacgaaagcttcggtggttacggatgggcatgcgttacattagctagttggtaaggtaacggcttaccacggcgaggatgtctaggggggctgagaggcttaacctccacagtggtacgtggacacggaccagactcctacgagaggcaaaagtgaggaataatgggcaatggacggaagtctgaaccagccatgccgcgtggaggaagaaagtcctatgggttgtaaactccttttgttcgagagtaataagaggcttgcgagcctcgatgagagtatcggacgaataagc

SEQ ID NO: 10254 - DNA, 490 bp, unidentified
  misc_feature 1..490: note = Ascusbbf_1436153, encodes 16S rRNA
  source 1..490: mol_type = genomic DNA
agagtttgatcctggctcaggatgaacgctggcggcgtgcctaacacatgcaagtcgaacggaaagaattcttcgggattcttccagtggcggacgggtgagtaacgcgtgggtaacctgccccatccaggtgaacaacagctggaaacggctgctaataccgcataagcgcccagtactgcatggtacagtgtgaaaagtttttatcggaatgggatggacccgcgtctgattagcttgttggagggggaacagcccaccaaggcgtcgatcagtagccgacctgagagggtgaccggccagattgagactgagacgcggaccaaactcctacgggggcagcagtggcggatattgcacaatgggcgaaagccagatgcagcgacgccgcgggagtgaggaagtatttcggtatgtaaagctctaacagtagggaagaaaatgacggtacctgactaagaagccccggctaactacgtgccagcagccg

SEQ ID NO: 10255 - DNA, 490 bp, unidentified
  misc_feature 1..490: note = Ascusbbf_1341436, encodes 16S rRNA
  source 1..490: mol_type = genomic DNA
agagtttgatcctggctcaggatgaacgctagcgacaggcctaacacatgcaagtcgaggggcagcgcgggagaagcttgcttttcctggcggcgaccggcgcacgggtgcgtaacaggtgtgcaatctgtccatagtcggggaatagcccagcgaacgttggattaatgctccatgtgtcacgaagccgcatgactttgtgatgaaacgtacggactatgggtgagcacgcttctgattagatagttggtgaggtaacggctcaccaagtctacgatcagtaggggttctgagcgggagggcacccacatgggaaatgagcacccgtccaaacgcctccgggaggaagcagtgaggaatattggtcaatgggcgagagcctgaaccagccaagtagcgtgcaggatgacggccctatgggttgtaaactgcttttatacggggataaagtgagggacgtgtccctttttgtaggtaccgtatgaataag

SEQ ID NO: 10256 - DNA, 490 bp, unidentified
  misc_feature 1..490: note = Ascusbbf_1436306, encodes 16S rRNA
  source 1..490: mol_type = genomic DNA
agagtttgatcatggtcaggatgaacgctagctacaggcttaacacatgcaagtcgaggggcagcataacgaaagcttgcttttgttgatggcgaccggcgcacgggtgagtaacgcgtatccaaccttccccttagtagggcatagcccggcgaaagtcggattaataccctatgttttccgttgaggacatctgaagtggaacaaagatttatcgctaagggatggggatgcgtctgattaggttgttagcggggtaccggcccaccaagccatcgatcagtaggggttctgagaggaaagtcacatacatgcggactgtggaccggactgaactgctacgggggcgagcagtgaggaatattggtcgatgggcgagagcctgaaccagccaagtagcgtgcaggatgacggccctatgggttgtaaactgcttttgcatgggaataaagtgagggacgtgtccctttttgtatgtaccatgagaata

SEQ ID NO: 10257 - DNA, 490 bp, unidentified
  misc_feature 1..490: note = Ascusbbf_1341433, encodes 16S rRNA
  source 1..490: mol_type = genomic DNA
agagtttgatcctggctcagaacgaacgctggcggcaggcttaacacatgcaagtcggacgggaacctattgatagcttgctattgtttgaggcgagtagcgcacgggtgagtaacacgtgggaacataccttatagtgggggataacaattggaaacgactgataataccgcataagtcctaagggagaaaggagcaattggctataagattggcccgcggaagattaggcagttggtggggtaaaggcctaccaaacctacgatctctagctggactgagaggacgaacagccacattgcgcctgagacacggagcagacaccaacgggggtcaacagtggagaatattaagcagtggggtaaagtctggcacagctgcgccgtgtgagggaaacagcttttcgaagtgaaaaactcttggggatgtgaagatgatgacggtagcatctgaagaagcaccggctaactccgtgccagcagccgcggta

SEQ ID NO: 10258 - DNA, 490 bp, unidentified
  misc_feature 1..490: note = Ascusbbf_1340868, encodes 16S rRNA
  source 1..490: mol_type = genomic DNA
agagtttgatcatggctcaggatgaacgctagcggcaggcttaacacatgcaagtcgaggggtaacgcggggtagcaatactctggcgacgaccggcgcacgggtgcgtaacgcgtatgcaacctccctctaacagggatgtaacggagagaaatttcaactaatcctccatactcatagagattcgcatgtttctctaatgatagcttcggtgtttacggatggacaggcgtaacattagctagttggtctggtaacggctcaccaaggcgacgatgtctaggggagctggggggctcatcgcccacactggtacggagacacggacaatactcctacgagaggaagcagtgaggaagattggtcaatggacggaagtctgaaccagccaggccgcgtggaggaagacggtcctatgggttgtaaactccttttgttcgagagtaataagaggcttgcgagcctagatgagagtatcggacgaagaagc

SEQ ID NO: 10259 - DNA, 490 bp, unidentified
  misc_feature 1..490: note = Ascusbbf_1322083, encodes 16S rRNA
  source 1..490: mol_type = genomic DNA
agagtttgatcctggctcaggatgaacgctagcggcaggcttaacacatgcaagtcgaggggcagcgcggggtagcaatactctggcggcgaccggcggaagggtgcgtaacgcgtaagcaacatgcccgtggcagggggataagcgatggaaacgtcgtctaagaccccgtaacaacagacctcgcatggggtttgtttgaaagcttcggcggccacggattggcccgcgtcccattaggcagttggcggggtaacggcccaccaaaccgacgatgggtaggggttgtgagaggaagggcccgaacgatggaacggacacacgatccacacacttacgcgaggcacaagtgaggaatagtggtcaatggagggaagcctgaaccagccatgccgcgtgcaggaagaaggccctacgggtcgtaaactgcttttgtacgggagcaataagggtcacgagtggcctgatgagagtaccgtacgaataagca

SEQ ID NO: 10260 - DNA, 488 bp, unidentified
  misc_feature 1..488: note = Ascusbbf_1322066, encodes 16S rRNA
  source 1..488: mol_type = genomic DNA
agagtttgatcctggctcagaacgaacgctggcggcaggcttaacacatgcaagttgagtgggatcgattagtagctcgctattgatcatgagagcagcgcactggtgagtaacacgtgggaacatactttttggcgggggacaacagctcgaaacgactgctaataccgcataagccctgagggggaaagcttattagccgagagattggcccgcggcagattaggtagtaggtggggtaacggcctacctagccgacgacctctagctggtctgagaggacgatgagccacattggaacgtaggcacgggccagtcacatgctagaggcggcagtggcgcaaagtgggcaatgggtgcaactctgggacagcaatgacacgtgagggaagagggttgtcggggaggaaagctcgttcatacaggaagaggaggacggtacggtgagaagaagcacgggggaacttcgtgccagcagccggggtaat

SEQ ID NO: 10261 - DNA, 490 bp, unidentified
  misc_feature 1..490: note = Ascusbbf_1434931, encodes 16S rRNA
  source 1..490: mol_type = genomic DNA
agagtttgatcctggctcaggatgaacgctggcggcgtgcttaacacatgcaagtcgaacggagttatctcgctgaggagtgcttgctcaactcttgagataacttagtggcggacgggtgagtaacgcgtggataacctgccttatactgggggataacacttagaaatcggtgctaataccgcataagcgcacgttcccgcatgggaaagtgtgaaaaactccggtggggtaagatggatccgcgtctgattagagagttggtgaggtaacggcccaccaagtcaacgatcagtagccggcctgggaggttgaacgggcacatagggacaggggcacggcccaaaatcctacgggaggcagcagtgaggaatattgcacgataggggaaacccggatgcagcgccgccgcgtgagtgaagaagtatgtcggtatgtaaagctctatcagcaaggaagaaaaaaatgacggtacttgactaagaagccc

SEQ ID NO: 10262 - DNA, 490 bp, unidentified
  misc_feature 1..490: note = Ascusbbf_1435028, encodes 16S rRNA
  source 1..490: mol_type = genomic DNA
agagtttgatcatggctcaggatgaacgctagcggcaggcttaacacatgcaagtcgaggggtaacgcggggtagcaatactctggcgacgaccggcgcacgggtgcgtaacgcgtatgcaacctacctgtaacaggggtataacggagagaaatttccactaatcccccatattgttattctttcgcatgttaggataacgaaagcttcggtggttacggatgggcatgcgtgacagtagctagttggtaaggtaacggcttaccaaggcgacgatgtctaggggagctgagaggcttatcgcgaccactagtaagatgagacggaccagaatacagcgagaggcagcagtgcggaagattggacaatggagggaagtctgaaccagccatgccgcgtggaggaagaaggtccgatgggttgtaaactccttttgttcgagagtaataagaggcttgcgagcctcgatgagagtatcggaagaataagc

SEQ ID NO: 10263 - DNA, 490 bp, unidentified
  misc_feature 1..490: note = Ascusbbf_1435009, encodes 16S rRNA
  source 1..490: mol_type = genomic DNA
agagtttgatcctggctcaggatgaacgctagcggcaggcttaacacatgcaagtcgaggggcatcgcggggtagcaataccctggcgtcgaccggcgcaagggtgcgtaacgcgtgagcgacattcccgtcacagggggataaccggcggaaacgccgcctaataacccatatgaggccaggccacatggccgggccttgcaagtccaggcggtgacggattccctcacgaccgattagccagttgggggggcaacggcccacccaggcgacgatcggtaggggttctgagaggaaggccccccaccacgacaataaaccaccgaccatcttccgacgggaggcagcagggaggattgctgggcaaggggaggacgcctgaaccagccacgcggggggcaggaatgcgtccgtacggttcgtgaactgcgtttcgcgcggagcaagaagaggagttcgcccctccgatgagagtacgcgcggaataagc

SEQ ID NO: 10264 - DNA, 162 bp, unidentified
  misc_feature 1..162: note = Ascusbbf_1434976, encodes 16S rRNA
  source 1..162: mol_type = genomic DNA
agagtttgatcctggctcaggatcaacgctggcggcgctcacaagacatgcaagcgtgccggaagccggtttacggattgtgaaatgattggggcagggcggcaaagggaccggacctggatggataacaacggctgaagtcgcggacgcggcagcgagacg

SEQ ID NO: 10265 - DNA, 490 bp, unidentified
  misc_feature 1..490: note = Ascusbbf_1371687, encodes 16S rRNA
  source 1..490: mol_type = genomic DNA
agagtttgatcatggctcaggacgaacgctggcggcgtgcttaacacatgcaagtcgaacggtaaggccctttcgggggtacacgagtggcgaacgggtgagtaacacgtgggtaatctgccctgcacttcggattaacccggggaactgggtcttatacccggtatttcgccttcattgcctggtgggtgtttggaagtttttcggtgtgggttgagtccgcggcctttccgcgtgtttgttgggtaagggccttcccaggcggcgacgggtagccggccttagagggggatcggccaccctgggactgagacacggcccagactcctacgggaggcagcagtggggaatattgcacaatgggcgaaagcctgatgcagcgacgccgcgtgggggatgacggtcttcggattgtaaacccctttcagtagggacgaagcgcaagtgacggtacctgcagaagaagcaccggccaactacgtgccagcag

SEQ ID NO: 10266 - DNA, 365 bp, unidentified
  misc_feature 1..365: note = Ascusbbf_1322080, encodes 16S rRNA
  source 1..365: mol_type = genomic DNA
agagtttgatcatggctcagattgaacgctggcggcaggcctaacacatgcaagtcgagcggatgaagggagcttgctcctggatttagcggcggacgggtgagtaatgcctaggaatctgcctggtagtgggggataacgtccggaaacgggcgctaataccgcatacgtcctacgggaggaagcagtgggccttagtgccttacgctatcaggcctgcctcagtcaggttaggtttgtgaagaaggtcttcggaatgtaaagcactttcagttgggaggaagggttgtagattaatactctgcaattttgacgttaccaacagaataagcaccggctaacttcgtgccagcagccgcggtaat

SEQ ID NO: 10267 - DNA, 486 bp, unidentified
  misc_feature 1..486: note = Ascusbbf_1434987, encodes 16S rRNA
  source 1..486: mol_type = genomic DNA
agagtttgatcatggctcagaacgaacgctggcggcaggtcttaggcatgcaagtcgaacggacgacagagtggcttgccattctgaagttagtggcgcacgagggagtaacgcgtgggaaactgcccttcactggggaataacgtctggaaacggacgctaataccgcatacgcccgcaagaggaaagatttatcggtgattgatgtgcacgcgttggattagcttgttggtggggtaatggcctaccaaggcgatgatccatagctggtctgagaagacgatcagccacgctggaactacgagacggaccagacacctacgggaggcagcagcgaagaatattgggcaatggaggaaactctgagctagcaatgccgcgtgaatgaagaaggccttcgggttgaaaagttctattagtcatgaagatgatgacagtagtgacagaaaaagcaccggctaacttcgtgccagcagccgcggtaat

SEQ ID NO: 10268 - DNA, 490 bp, unidentified
  misc_feature 1..490: note = Ascusbbf_1322239, encodes 16S rRNA
  source 1..490: mol_type = genomic DNA
agagttgatcatggcacaggatgaacgctggcggcgtgcctaagacaggcaagtcgaacgagggttctcgtcggggaaaccgagtggcgaacgggggaggaacacataggtaatctacctttcagaaggggagacccaagagaaaggtgggctaataccgtatacaatcgtttctccgcatggagatttgatgaaaggggctccaaagcctcgctgttagatgaacctgtggcacattagctagttggtgagataacagcccaccaaggcgaagatgtgtagccgatctgagaggataatcggccacaatgggactgagacacggcccgtactcctacgggaggcagcagtagggcgttttcggcaatgggggaaaccctgaccgagcaacgccgcgtgatttagaaggccctctgggtcgtaagaatctgttgtaaaggagaaatggtagtgggaggaaatgcccattatttgatagtactttattaga

SEQ ID NO: 10269 - DNA, 490 bp, unidentified
  misc_feature 1..490: note = Ascusbbf_1371712, encodes 16S rRNA
  source 1..490: mol_type = genomic DNA
agagtttgatcctggctcaggacgaacgctggcggcatgcttaacacatgcaagtcgaacggacggattccttcgggatgaaagttagtggcgaacgggggagtaatgtatgagcaacctgccgctatcaacgggagaacagtgggaaacgacggctaatacggtagaagaccacggcaccgcaggaggcggcggtaaaagatgggtcggatagagatgggcccagatcccatgagctagttggtgagataacagcccaccaaggcgacgaggggtagccgagcggagaggcggatcggccaccttgggactgcaccacggcccagcctcctccgggaggccgccgtggggcctcttgggcactggaggcccctctgcccccgcactgccgcgtgcgtgatgaaggtccttttcttgtcaagctcttttctcaggaacgcatacagatgacggtacctgaggaatccgccccggctaactacgcgccagc

SEQ ID NO: 10270 - DNA, 490 bp, unidentified
  misc_feature 1..490: note = Ascusbbf_1341112, encodes 16S rRNA
  source 1..490: mol_type = genomic DNA
agagtttgatcctggctcaggataaacgctggcggcgtacataagacatgcaagtcgaacgaactcaatcgaaagtttacttttgaagcggttagtgccggaccggtgagtaacgcgtaagcaatccgcccatcagaggggaacaacagcgagaaatcatcgccaacaccgcataagctgtgagtatcgcatgacacaaatagaaaaggagcaatccgctgagagatgagcttgcgtctgattagttagttggtggggtaacggcctaccaagacgattatcagtagccggactgagagggtcagcggccacattggggctgggatccgacccagactcctacgggaggcggcagtcggggatattgcgcaatgggggaaacgctgacgcagtgacgccgcgtgcaggaagaaggttttcggattgtaaactgctttagatagggaagaaaaaaatgacggtacctatagaataagctccggctaactac

SEQ ID NO: 10271 - DNA, 490 bp, unidentified
  misc_feature 1..490: note = Ascusbbf_1373071, encodes 16S rRNA
  source 1..490: mol_type = genomic DNA
agagtttgatcctggctcaggatgaacgctagcggcaggcttaacacatgcaagtcgaggggcagcgcggggtagcaatactctggcggcgaccggcggaagggtgcgtaacgcgtgagcaacttgcccgtcactgggggataggcactggaaacggtgtgtaatactccataatatatggattcacatggattcatattgaaagattcgttggtgacggatgggctcgcgtaacattagctagtcggcggggtaacggcccaccgaggctacgatatttaggggttctgagaggaaggttgccagtacgggaacgagacaacggaccagactctgacgggaggcagaagggaggaatattggtcaatgggcggaagctggaccaagccatgcggcgggaaggaataaggccctatgggtcgtaaactgcttttcattgagggcaataagggtcacgagtggcccgatgagggtctcaggggaataagca

SEQ ID NO: 10272 - DNA, 468 bp, unidentified
  misc_feature 1..468: note = Ascusbbf_1434818, encodes 16S rRNA
  source 1..468: mol_type = genomic DNA
atagtttgatcctggctcagaacgaacgctggcggtaggcttaacacatgcaagtcgagcgccccgcaaggggagcggcagactggtgagtaacgcgtgggaatctacccatctctacggaataactcagggaaacttgtgctaataccgtatacgcccttctggggaaagatttatcggagatggatgagcccgcgttggattagctagttggtggggtaaaggcctaccaaggcgacgatccctagctggtctgagaggatgatcagccacactgggactgagacacggcccagactcatgcgggggggaggagggggggagattggaaaaggggaggcagcctggaacagacatggcggggaaggagtggaggcccgaggggtagaaagcttttttaccggtgaagataatgacggtagtcggggaagaagccccggctaactacgtgccagcagccgcggtaat

SEQ ID NO: 10273 - DNA, 468 bp, unidentified
  misc_feature 1..468: note = Ascusbbf_1373109, encodes 16S rRNA
  source 1..468: mol_type = genomic DNA
agagtttgatcatggctcagaacgaacgctggcggcaggcttaacacatgcaagtcgagcgccccgcaaggggagcggcagacgggtgagtaacgcgggggaagcgacccatcgcgacggaagaacgcagggaaacgggggctaataccggagacgccctgcgggggaaagatttatcggagatggaggagcccgcgttggatgagcgagttggtgaggtaaaggctcaccaaggcgacgatccatagcggggccgagaggatgatcagccacactgggactgagacacggcccagacgcctccgggcggcagccgtggggcatcttggccactgggcgcccgcctgctcccgccctgccgcgtgcgtgatgacggccctagggttgtccagctctttcaccggtgacgctaatgccggtacccggagacgccgccccggctaccttcgtgccagcagccgcggtaat

SEQ ID NO: 10274 - DNA, 490 bp, unidentified
  misc_feature 1..490: note = Ascusbbf_1341015, encodes 16S rRNA
  source 1..490: mol_type = genomic DNA
agagtttgatcctggctcaggatgaacgctagcggcaggcttaacacatgcaagtcgaggggcagcgcggggtagcaatacttctggcggcgaccggcggaagggtgcgtaacgcgtgagcaacatgcccgtggcagggggatacgcgatggaaacgtcgtctaagaccccgtaacaacagacctcgcatggggtttgttagaaagcttcggcggccacggcttggctcgcgtcccattaggcagtttgcggggtaccggcccaccaaaccgccggggggtcgggggtcttagcggaaggtcaccagcagtggaactgagacacggtccatactcctgcgggaggcagcagggaggaatattggtcaatgggcggaagcctgaaccagccatgccgcgggcaggaagaaggccctacgggtcgtaaactgcttttgtacgggagcaataagggtcacgagtggcctgatgagagtaccgtacgaataagc

SEQ ID NO: 10275 - DNA, 490 bp, unidentified
  misc_feature 1..490: note = Ascusbbf_1373090, encodes 16S rRNA
  source 1..490: mol_type = genomic DNA
agagtttgatcctggctcaggataaacgctggcggcgcacataagacatgcaagtcgaacggacttaaatcattgttaacgattgagagcggttagtgggggagtggtgagtaatgtataggtaatgtgcgtatgagaggggaacaacaggtggaaacgactgataatagcgcatatgccacgagaatcacatgggtcaagtggggaaggaggaaaccgctgaaagatcgacttatatatgaataagaagatggtggggtaacagcataccaaggcgacgagcagtagccggactgagaggttaaccggccaaattgggactgagctacggcccagactacgacggaaggcagcagacgggaatattgcgcaatggaggatactctgacgcagtgacgccgcgtgcaagaagaaggttttcggattgtaaactgctttagacagggaagaaaaaagacagtacctgttgaataagcaccggctaactacg

SEQ ID NO: 10276 - DNA, 490 bp, unidentified
  misc_feature 1..490: note = Ascusbbf_1341006, encodes 16S rRNA
  source 1..490: mol_type = genomic DNA
agagtttgatcatggctcaggatcaacgctggcggcgcacataacacacgcaagtcgaacggacttaactcattcttaacgcttgagagcgggtagtggcggactgttgattactgtattacaaacctccctatcagaggggaacaacagttggaaacgactgttaatcccccttatgccacgagaatcacatggttcaagtgggaaaggatcaatccgcttttagatggaattatatctgctgagctagttgttggggtcacggcctaccaaggcgacgatcagttgccggactgagaggttaagaagccacactgggactgaggtacggaacagactcctacggtgggcagcagtcgggaatattgcgcaatggaggaaactctgacgcagggacgccgcgtgcaggaagaaggttttcggattgtagactgctgtagacagggaagaaaaaagacagtacctgtagaataagctccggctaactacg

SEQ ID NO: 10277 - DNA, 490 bp, unidentified
  misc_feature 1..490: note = Ascusbbf_1324874, encodes 16S rRNA
  source 1..490: mol_type = genomic DNA
agagtttgatcatggctcaggatgaacgctagcggcaggcttaacacatgcaagtcgaggggcagcgcggggtagcaataccctggcggcgaccggcggaagggtgcgtaacgcgtgagcaacttgcccgtcactgggggataggcactggcaacggtgagtaatactcaataacatatggatgcacatggagttatattataagattcgttggtgacggatggtctcgcgtaacgttagctagtcggcggggtaacggcacaccgaggctacgaggtttaggggttctgggaggaaggtccccacccgtggaactgggacacggtccagactcctacgggaggcagcagtgaggaatattggtcaatgggcggaagcctgaaccagccatgccgcgtgcaggaataaggccctatgggtcgtaaactgcttttccttgagggcaataaggatcacgtgtggcccgatgagagtatcaggggaataagca

SEQ ID NO: 10278 - DNA, 490 bp, unidentified
  misc_feature 1..490: note = Ascusbbf_1373117, encodes 16S rRNA
  source 1..490: mol_type = genomic DNA
agagtttgatcctggctcaggatgaacgctagcggcaggcttaacacatgcaagtcgaggggcagcgcggggtagcactatcctggcggcgaccggcggaagggtgcgtaacgcgtgagcaacttgcccgtcactggaggataggcactggaaacggtgtgtaatactccataacatcagttttcgcatgaagctttattgaaagattcattggtgacggatgggctcgcgagacattagctagtcggcggggtaccggcccaccgaggctacgatgtctaggggttctgagaggaaggtcacgcacacgggacctgagacacggcccagaagcctacgggaggcagcagtgaggaatattggtcaatgggcggaagcctgaaccagccatgccgcgtgaaggaataaggccctatgggtcggaaacttcttttccgtgggggcaagaaggatcacgcgtggtccgatgagagtaccaggggaataagca

SEQ ID NO: 10279 - DNA, 486 bp, unidentified
  misc_feature 1..486: note = Ascusbbf_1434811, encodes 16S rRNA
  source 1..486: mol_type = genomic DNA
agagtttgatcctggctcagaacgaacgctggcggcaggtcttaggcatgcaagtcgaacggacgacagagtggcttgccattcttcagttagtggcgcacgagtgcgtaacgcgtgggaaactgcccttcactggggaataacgtctggaaacggacgctaataccgcatcctcccgcaatgggaaggatttatcggtgatggatgtgcccgcgttggattagctttttggtggggtaatggcctaccacggcgatgatccatagctggtctgagaggacgatcagccacgctggaactgagacacgggccagaatgctacgggaggcagcagctaagaatattgggcaatggaggaaactctgacccagccatgccgcgtgaatgaagaaggccttcggggtgtaaagttcttggagtcatgaagatgatgacagtagtgacagaaaaagcaccggctaacttcgtgccagcagccgcggtaat

SEQ ID NO: 10280 - DNA, 490 bp, unidentified
  misc_feature 1..490: note = Ascusbbf_1324757, encodes 16S rRNA
  source 1..490: mol_type = genomic DNA
agagtttgatcatggctcaggatgaacgctggcggcgtgcttaacacatgcaagtcgaacggggattatttcattgaagcttcggcagatctggtttaatcctagtggcggacgggtgagtaacgcgcgtgtaacctgccttatacagggggataacagtcagaaatggctgctaataccgcataagcgcacagggtcgcatgatccagtgtgaaaaactgaggtggtataagatgaaccggcgttggattagccagttggcagggtaacggcctaccaaagcgacgatccatggccggccggagggggtgaccggcaacatggggacgggcaaagggcccaaactccgacggggggcagcagtggggaatattggacaatgggggaaaccctgacgcagcgacgccgcgggaaggaaaaagtatctcggtatgtaaacttctatcagcagggaagaaaatgacggtacctgactaagaagccccggcta

SEQ ID NO: 10281 - DNA, 490 bp, unidentified
  misc_feature 1..490: note = Ascusbbf_1434823, encodes 16S rRNA
  source 1..490: mol_type = genomic DNA
agagtttgatcctggctcaggataaacgctggcggcgcacataagacatgcaagtcgaacggacttaactcattcttaacgattgagagcggttagtggcggactggtgattaatgtataagtaacctgcctatcagatgggaaccacagttggaaacgacttctaatcccgcatatgccacgagaatcacatcgttccagtgggaaaggagcaatccgctaatagatggacttatatctgatgagctagtaggaggggtaacggcctaccaaggcgcagatcagtagccggactgagagggtaaacgaccacattgggactgagagacggacccggatcctacgggaggcagcagtcgggaagattgcgcaatggaggaaacgctgacgcagtgacggcgcgtgaaggaagaagggtttcggattgtaaacggatttagaaagggaagaaaaaagacagtaccgggagaataagcaccggctaactacg

SEQ ID NO: 10282 - DNA, 490 bp, unidentified
  misc_feature 1..490: note = Ascusbbf_1434822, encodes 16S rRNA
  source 1..490: mol_type = genomic DNA
agagtttgatcctggctcaggatgaacgctagcggcaggcttaacacatgcaagtcgaggggcagcgcggggtagcactctcctggcggcgaccggcggaagggtgcgtaacgcgtgagcaacttgcccgtccctggaggataggcactggaaacggtgtgtaatactccataacataagttttcgcatgaagatttattgaaagattcattggtgacggatgggctcgcgagacattagctagtcggcggggtaacggcccaccgaggctacgatgtctaggggttctgagaggaaggtcacccacaacggcactgggacacggtccggactcctacgggaggcagcagtgaggaatattgggcaaggggcggaagcctgaaccagccaggccgcgtgaaggaagaaggccctatgggtcggaaacttcttttccttgggggcaataaggagcacgcgtggtccgatgagagtaccaggggaataagca

SEQ ID NO: 10283 - DNA, 488 bp, unidentified
  misc_feature 1..488: note = Ascusbbf_1324818, encodes 16S rRNA
  source 1..488: mol_type = genomic DNA
agagtttgatcatggctcagaacgaacgctggtggcaggcttaacacatgcaagttgagcgggattaattgatagcttgctatttattatgagagcagcgcactggtgagtaacacgtgggaacatacctttttgtggtggacaacagttggaaacgactgctaataccgcataagccctaagggggaaggattaattgccgaaaggttgtcccgcggaagattaggtagtaggtggggtaacggcctacctaggcggctatctatagctgatctgagaggacgagcagccacattggaactgagacacggtccagactcctacgggaggcagcagggaggaagattgggcaatggaggaaacacggacccagctaggccgcgtgagtgaagaaggttttcggattgtaaagctctgtaagacgggaagaggatgacggtaccgtaagaagaagcaccggctaacttcgtgccagcagccgcggtaat

SEQ ID NO: 10284 - DNA, 490 bp, unidentified
  misc_feature 1..490: note = Ascusbbf_1341045, encodes 16S rRNA
  source 1..490: mol_type = genomic DNA
agagtttgatcctggctcaggatgaacgctagcggcaggcttaacacatgcaagtcgaggggtaacgcggggtagcactactcttgcgacgaccggcgcacgggtgcgtaacgcgtatgcaacctccctgtaaccgggttatcacggagataaatttccactaatcccccatattgttattctttcgcatgttaggataacgaaagcttcttttgttacggatgggcatgcgtgacattagctagtttatacggtaacggcttaccaaggcgacgattggtaggggagctgagaggcttatcaccaacactggtactgagacagggaccagactcctacgggaggcagcagtgaggaatattggtcaatggacggaagtctgaaccagccatgccgcgtggaggaagaaggtcctatgggttgtaaactccttttggtcgagagtaataagaggcttgcgagcctcgatgagagtatcggacgaataagc

SEQ ID NO: 10285 - DNA, 490 bp, unidentified
  misc_feature 1..490: note = Ascusbbf_1342317, encodes 16S rRNA
  source 1..490: mol_type = genomic DNA
agagtttgatcctggctcaggataaacgctggcggcgcacataagacatgcaagtcgaacggacttaactcattcttaacgcttgctagcggttagtggcggactggttagtaatgtataattaacctgcctatccgaggggaacaacagttggaaacgcctgctaataccgcatattccccgataatcacatggttcaagtgggcaaggatcactccgctgatagatggacgtatatctgattagctatttggtggggtaaaggcctaccaaggcgacgatcagtagccggactgagaggtgaaaaggccacattgggactgagagacggcccagactcctacgggaggcagcagtcgggaatattgcgcaagggaggaaactctgacgcagtgacgccgcgtgcaggaagaaggttttcggagtgtaaaatgctttagacagggaagaaaaaagacagtacctgtagaataagctccggctaactacg

SEQ ID NO: 10286 - DNA, 490 bp, unidentified
  misc_feature 1..490: note = Ascusbbf_1372519, encodes 16S rRNA
  source 1..490: mol_type = genomic DNA
agagtttgatcctggctcaggatgaacgctagcggcaggcttaacacatgcaagtcgaggggcagcgcggggtagcactactctggctgctaccggcggaagggtgcgtaacgcgtgagcaacttgcccttccctgggtgataggcactggcaacggtgtgtaatactccatcacatatggattcacatggattcatattgaaagattcgttgttgacggattggctcgcgtaacattagctagtcggcgtggtaacggcccaccgaggctacgatgtttaggtgttctgagaggaaggtcacccacactggaacggagacacggtacagactcctacgggaggcagcagtgaggaatagtggtaaatgggaggaagcctgaaccagccatgcagcgtgaaggaataaggccctatgggtcgtaaactgcttttccttgagggcaataaggggcacgtgtggcccgatgagagtatcaggggaataagca

SEQ ID NO: 10287 - DNA, 490 bp, unidentified
  misc_feature 1..490: note = Ascusbbf_1435485, encodes 16S rRNA
  source 1..490: mol_type = genomic DNA
agagtttgatcatggctcaggatgaacgctggcggcgtgcttaacacatgcaagtcgaacggagttatctcgctgaggagagcttgctcaaatcttgagataacttagtggcggacgggtgagtaacgcgtggataacctgccttataccgggggataacacttagaaataggtgctaataccgcataagcgcacgatctcgcatgggaaagtgtgaaaaaccccggtggtataagatggatccgcgtctgactagatagttggtgaggtaacggcccacaaagtcaacgatcagtagccggccagacagggtgaacggccagaatgggactgagacacgacccagacgcctgcgggatgcggcaatggggaaaattgcacaatgggcgagaccctgatacggcgacgccgcgtgggtgaagaaatatttcggtatgtaaagctctatcagcaaggaagaaaaaaatgacggtacttgactaagaagccc

SEQ ID NO: 10288 - DNA, 490 bp, unidentified
  misc_feature 1..490: note = Ascusbbf_1435453, encodes 16S rRNA
  source 1..490: mol_type = genomic DNA
agagtttgatcctggctcaggatgaacgctggcggcgtgcttaacacatgcaagtcgaacggagttatctcgctgaggagagcttgctcaaatcttgagataacttagtggcggacgggtgagtaacgcgtggataacctgccttataccgggggataacacttagaaataggtgctactaccgcataagcgcacgatcccgcatgggaaagtgtgaaaaactccggtggtataagatggatccgcgtctgattagatagttggtgaggtaacggcccaccaagtcaacgatcagtagccggactgagaggagtaaaggccacatagggactgagacacggcccaaacgcctacgggaggaagcagtggggactattgcaaaatgggggaaaccctggtgcaacgacgccgcgtgagagaagaagtatgtcggtatgtaaagctctatcagcaaggaagaaaaaaatgagggtacatgacgaagaagccc

SEQ ID NO: 10289 - DNA, 487 bp, unidentified
  misc_feature 1..487: note = Ascusbbf_1324463, encodes 16S rRNA
  source 1..487: mol_type = genomic DNA
agagtttgatcctggctcaaaacgaacgctggcggcaggcttaacacatgcaagtcgagcgggagtgagggagagcttgctattgatcatgagagcagcgcacgggtgagaaacacgtgggaacataccttgtggggggggacaacaggcggaaacgactgcgaataccgcataagccctgagggggaaagattaattgccgagagattggcccgcggaagattaggtagtaggtggggtaacggcctacctagccgacgatctatagctggtctgagaggacgatcagccacattggaacggagacacggtccagactcctacgggaggcagcagtgaggaatagtgggcaatggagggaactctgacccagccatgccgcgtgagtgaagaaggttttcggattgtaaagctctttcagacgggaagatgaggacggtaccgtcagaagaagcaccggctaacttcgtgccagcagccgcggtat

SEQ ID NO: 10290 - DNA, 490 bp, unidentified
  misc_feature 1..490: note = Ascusbbf_1373179, encodes 16S rRNA
  source 1..490: mol_type = genomic DNA
agagtttgatcctggctcaggatgaacgctagctacaggcttaacacatgcaagtcgaggggcagcattaaagtttgcttgcaaactttagatggcgaccggcgcacgggtgagtaacacgtatccagcctgccgataactcggggatagcctttcgaaagaaagattaatacccgatggcatatttttaccgcatggtgaaactattaaagaatttcggttattgatggggatgcgttccattaggcagttggtgaggtaacggctcaccaaactttcgatggataggggttctgagaggaacgtcacgcacaatggagctgagacaaggtccaaactctgacgggaggaagcagtgaggaatattggtccatgggcgcgagcctgaaccagccaagtagcgtgaaggatgacggcccgatgggttgtaaacttcttttatatgggaataaagtttggtatgcataccattttgtatgtaccatatgaa

SEQ ID NO: 10291 - DNA, 490 bp, unidentified
  misc_feature 1..490: note = Ascusbbf_1435457, encodes 16S rRNA
  source 1..490: mol_type = genomic DNA
agagtttgatcctggctcaggatgaacgctggcggcgtgcttaacacatgcaagtcgaacggagttatctcgctgaggagcgcttgctcacatcttgagataacttagtggcggacgggtgagtaacgcgcggataacctgccttataccgggggataacacttagaaataggtgctaataccgcataagcgcacgatcccgcatgggaaagtgtgaaaaaatccggtggtatacgatggatccgcgtgtgattagatagttggtgaggtaacggccaaccaagtcaacgatcagtagccggccagagaggtgtaacggacacattggaactgagacacgggccaaacgcctacgggaggcagcagtggggaatagtgcacaatgggggaaacccggatgcagcgacgccgcgtgagtgaagaagtatttcggtatgtaaagctctatcagcaaggaagaaaaaaatgacggtacttgactaagaagccc

SEQ ID NO: 10292 - DNA, 490 bp, unidentified
  misc_feature 1..490: note = Ascusbbf_1324806, encodes 16S rRNA
  source 1..490: mol_type = genomic DNA
agagtttgatcctggctcaggatgaacgctagctacaggcttaacacatgcaagtcgaggggcagcattaaagtttgcttgcaaactttagatggcgaccggcgcacgggtgagtaacacgtatccagcctgccgataactcggggatagcctttcgaaagaaagattaatacccgatggcatatttttaccgcatggtgaaactattaaagaatttcggttattgatggggatgcgttccattaggcagttggtgaggtaacggctcaccaaactttcgatggataggggttctgagaggtggggacccatgatgggatgagagaaacggaccaaactcctacgggaggcagcagtgaggaagatgggtcaatgggcgcgagcgtgaaccagacaagtagcgtgaaggatgacggccctatgggttgtaaacttcttttatatgggaataaagtttggtaggcataccatgttgtatgtaccatatgaa

SEQ ID NO: 10293 - DNA, 488 bp, unidentified
  misc_feature 1..488: note = Ascusbbf_1324799, encodes 16S rRNA
  source 1..488: mol_type = genomic DNA
agagtttgatcctggctcagaacgaacgctggcggcaggcttaacacatgcaagttgagcgggattgatttatcgcttgctattgatcatgagagcagcgcactggtgagtaacacgtgggaacataccttttggtgggttacaacagttggaaacgactgctaatacctcataatccctgagggggaaagattaattaccgagagattggcccgcggaagactcggtagtagtgggggtaacggcctacctagcctacgatctatagctggtctgagaggactatcagccacattggaactacgacacggtccagactcctacgggaggcggaagtgaggaatattgggcaatggagggaactctgacgcagccatgccgcgtgagtgaagaaggttttcggattgtaaagctctttcagacgggaagatgatgacggtaccgtcagaagaagcaccggctaacttcgtgccagcagccgcggtaat

SEQ ID NO: 10294 - DNA, 486 bp, unidentified
  misc_feature 1..486: note = Ascusbbf_1324798, encodes 16S rRNA
  source 1..486: mol_type = genomic DNA
agagtttgatcctggctcagaacgaacgctggcggcaggtcttaggcacgcaagtcgaacggacgacagagtggcttgccattctgaagttagtggcgcacgagtgagtaacgcgtgggaaactgcccttccctggggaataacgtctggaaacggacgctactaccgcatacgcccgcaaggggaaagatttagcggtgattgatgtgcccgcgtaggattagcttgttggtggggtactggcctaccaaggcgatgatccctagctggtctgagaggacgatcagccatgctggaacttagacacggtccagacgcctacgggaggaagcagctaagaatattgggcaagggaggaaactctgacccagccatgccgcgggaatgaagaaggcctgcgggttggaaagttctgttagtcatgaagatgatgacagtagtgacagaaaaagcaccggctaacttcgtgccagcagccgcggtaat

SEQ ID NO: 10295 - DNA, 490 bp, unidentified
  misc_feature 1..490: note = Ascusbbf_1324805, encodes 16S rRNA
  source 1..490: mol_type = genomic DNA
agagtttgatcatggctcaggatgaacgctagctacaggcttaacacatgcaagtcgaggggcagcataacgaaagcttgcttttgttgatggcgaccggcgcacgggtgagtaacgcgtatccaaccttccccttagtagggcatagcccggcgaaagtcggattaataccctatgttttccgttgaggacatctgaagtggaataaagatttatcgctaagggatggggatgcgtctgattagattgttggcggggtaacggcccaccaagccatcgatcagtaggggttctgagaggaagggcaccgacattggtacggagacaaggaacaaactccgaagagaggcagaagtgaggaagattggtaaatgggcgagagcctgaaccagccaagtcgcgggaaggatgaaggttttcggagtgtaaacttcttttattaaggacgaaaaatgacggtacttaatgaataagctccggctaactacgt

SEQ ID NO: 10296 - DNA, 490 bp, unidentified
  misc_feature 1..490: note = Ascusbbf_1372898, encodes 16S rRNA
  source 1..490: mol_type = genomic DNA
agagtttgatcctggctcaggatgaacgctggcggcgcacataacacatgcaagtcgaacgaacttaatcgaacgtttacttttgaagcggttagtggcggactggtgagtaacgcgtaagcaatctgcctatcagaggggtataacagtgagaaatcattgctaataccgcataatctgtgagtatcccatgatacaaattgaaaaggagcaatcagctgttagatgtgcttgcgtctgattcgttagttggttgggtaacggcctacccagacgatgatcagtagccggactgagaggttaaacggccacattggaactgagatacggaccagactcctacgggaggcagcagtcgggaatattgcgaaatggaggaaaccctgacgcagtgacgccgcgtgcaggaagaaggttttcggattgtaaactgctttagatagggaagaaaaaaatgacggtacctctagaataagctccggctaactac

SEQ ID NO: 10297 - DNA, 490 bp, unidentified
  misc_feature 1..490: note = Ascusbbf_1322178, encodes 16S rRNA
  source 1..490: mol_type = genomic DNA
agagtttgatcatggctcaggatgaacgctggcggcgtgcttaacacatgcaagtcgaacgaagcacttaatcggatttcttcggaatgaaagttttgtgactgagtggcggacgggtgagtaacgcgtgggtaacctgcctcatacagggggataacagttagaaatgactgctaataccgcataagaccacagcttcgcatgaagcaggggtaaaaactccggtggtatgagatggacccgcgtctgattaggtagttggtgaggtaacggcccaccaagccgactatcagtagccgaaccgagaaggtgaacggacaaagtgggaacaggaaaacgccccaacgccgtacggaggcaggcggtgggaataatggcacatgggggaaaccctgatgcagcgacgccgcgtgagcgatgaagtatttcggtatgtaaagctctatcagcagggaagaaaaaagacggtacctgactaagaagcaccggc

SEQ ID NO: 10298 - DNA, 490 bp, unidentified
  misc_feature 1..490: note = Ascusbbf_1341079, encodes 16S rRNA
  source 1..490: mol_type = genomic DNA
agagtttgatcatggctcaggatgaacgctagctacaggcttaacacatgcaagtcgaggggcagcataacgaaagcttgcttttgttgatggcgaccggcgcacgggtgagtaacccgtatccaaccttccccttagtagggcaaggccggccgaaagtgggattaataccctaggttttccgttaggacaatcggaggggaaaaaaggtttaatgcctaagggtgggggatgcgtcggatcagttgtttgcgggggtaagggcccaccaagccatcgataagaaggggttctgagaggaaggtcccccacattggtactgagacacggaccaaactcctacgggaggcagcagtgaggaatattggtcaatgggcgagagcctgaaccagccaagtagcgtgcaggatgacggccctatgggttgtaaactgcttttgcatgggaataaagtgagggacgtgtccctttttgtatgtaccatgagaat

SEQ ID NO: 10299 - DNA, 490 bp, unidentified
  misc_feature 1..490: note = Ascusbbf_1372843, encodes 16S rRNA
  source 1..490: mol_type = genomic DNA
agagtttgatcctggctcaggatgaacgctggcggcgtgcttaacacatgcaagtcgaacggagttatctcgctgaggagagcttgctcaaatcttgagataacttagtggcggacgggtgagtaacgcgtggataacctgccttataccgggggataacacttagaaataggtgctaataccgcataagcgcacgatcccgcatgggaaagtgtgaaaaactccggtggtaaaagatggatccgcgtctgatcagatagttggtgaggtaacggcccaccaagtcaacgatcagtagccgccctgagcaggtgaccgaccaaattgggactgggaaccggccccaactcctccggaaggcagaagtggcgagtattgcacaatgggggaaacccggatgcagcgacgccgcgtgagtgaagaagtatttcggtatgtaaagctctatcagcaaggaagaaaaaaatgacggtacttgactaagaagccc

SEQ ID NO: 10300 - DNA, 467 bp, unidentified
  misc_feature 1..467: note = Ascusbbf_1341105, encodes 16S rRNA
  source 1..467: mol_type = genomic DNA
agagtttgatcctggctcagaacgaacgctggcggcaggcttaacacatgcaagtcgagcgccccgcatttggagcggcagttgggtgagtaacgaccgggaacctacccatttctacggaaccaaccatgccaacttgtgctaataccgcatacgccctccgggggatagctttagtggtgatggttgagcccgcgtggaattacgtagttgcggcggtaaaggctcagtatggctacgatcaattgctggtctgagaggatgaccagccacactgggactgagacacggcccagacgcatacgggggcaagcagtggggaagataggacaatgagcgcagtcctgatccagccaggccgggggagtgaagaaggccctagggttgtaaaactcatgcaccggtgaagataaggacggtaaccagagaagaagccccggcaaacttggggccagagccgcggtaat

SEQ ID NO: 10301 - DNA, 486 bp, unidentified
  misc_feature 1..486: note = Ascusbbf_1434914, encodes 16S rRNA
  source 1..486: mol_type = genomic DNA
agagtttgatcctggctcagaacgaacgctggcggcaggtcttaggcatgcaagtcgaacggtcgccagagtggcttgccattctgaagttagtggcgcacgagtgagtaacgcgtgtgaaactgcccttcactgggggataacgtctggaaacggacgctaatacctcatacgcccgccaggggaaagatttatcggcgacgtatgtgcccgcgttggattagattgttgttggggtaatggcctacacaggcgatgatccatcgctggtccgagaggacgatcatccacgctggaactgagacacggtccagactcatacgggaggcagcagctaagaatagtgggcaagggaggaaactctgacccagccatgccgcgtgaatgaagaaggccttcggggtgtaaagttcttttagtcatgaagatgatgacagtagtgacagaaaaagcaccggctaacttcgtgccagcagccgcggtaat

SEQ ID NO: 10302 - DNA, 490 bp, unidentified
  misc_feature 1..490: note = Ascusbbf_1341116, encodes 16S rRNA
  source 1..490: mol_type = genomic DNA
agagtttgatcatggctcaggacgaacgctggcggcgtgcctaacacatgcaagtcgagcggagccaatcggacaatcctttcggggcgcgcttgaggccgcttagtggcggacgggtgagtaacgcgcgagtaacctgcccataagagggggataacacagagaaatctgcgctaatacccaatattgaattagaatcgcatggttttaatttgacagatttatcgcttatggatggactcgcgtctgattagatagctggcggggcaacggcccaccaagtcgacgatcagtagccgaacgacgaggaggatcggccacatatggactggggcacggcccaggatcctacgggaggcagcagtgggggagaatgcgcaatgggggaaaccctgacgcagcaacgccgcgtgaaggaagaaggctgtcgggttgtaaacttctgttcttagggaagaagacagtgacggtacctaaggagcaagtcacg

SEQ ID NO: 10303 - DNA, 490 bp, unidentified
  misc_feature 1..490: note = Ascusbbf_1341062, encodes 16S rRNA
  source 1..490: mol_type = genomic DNA
agagtttgatcctggctcaggatgaacgctggctgcgtgcctaacacatgcaagtcgaacggaaaggattcttcggaattctttcagtggcggacgggtgcgtaacgcgtgggtaacctgccccatacaggggaacaacagctggaaacggctgctaataccgcataagcgcacagtactgcatggtacagtgtgaaaagattttagcggtattggatggacgcgcgtctgattagctagtttggggtgtaacggcccaccaagcccacgataagtagccgaactgggggggtgaccagcaacatgggtactgagacacggcccaaacacctacgggaggcagcagtgggggatatgacacaatgggcgaaagcctgatgcagcgacgccgcgtgagtgaggaagtatttcggtacgtaaagctctatcagcagggaagaaaatgacggtacctgactaagaagccccggctaactacgtgccagcagcc

SEQ ID NO: 10304 - DNA, 490 bp, unidentified
  misc_feature 1..490: note = Ascusbbf_1341127, encodes 16S rRNA
  source 1..490: mol_type = genomic DNA
agagttgatcatggctcaggatgaacgctggcggcgtgcttaacacatgcaagtcgaacggagttatctcgctgaggagagcttgctcaaatcttgagataacttagtggcggacgggtgagtaacgcgtggataacctgccttataccgggggataacacttagaaataggtgctaataccgcataagcgcacgatcccgcatgggaaagtgtgaaaaactccggtggtataagatggatccgcgtctgattagatagttggtgaggtaacggcccaccaagtcaacgatcagtagccggactgagagggggaacagccacattgggactgggaaacgggcccaaatcctacggggggcagcaatggggaataattcacaatggggggaaacccggaggagggaaggcgcgggaggggagaaataattccggtagtaaaggtctaacaacaaggaaagaaaaaaatgacggtacttgactaagaagccc

SEQ ID NO: 10305 - DNA, 488 bp, unidentified
  misc_feature 1..488: note = Ascusbbf_1324653, encodes 16S rRNA
  source 1..488: mol_type = genomic DNA
agagtttgatcatggctcagaacgaacgctggcggcaggcttaacacatgcaagttgagcgggattaattgatagcttgctattaattatgagatcagcgcactggttagtaacacgtgggaacataccttttggtggtggacaacagttggaaacgactgctaataccgcataatccctaaggggtaaatattaattgccgaaagattggcccgcggaagattaggtagtaggtgtggtaacggcctacctagccgacgatctatagctggtctgagagtactatcagccacattggaacggagaaagggtccagactcctacgggaggcagcagtgaggaatattgggcaatggaggcaacgctgacccagacatgccgcgggagtgaagaaggttttcggattgtaaagctttttcagacgggaagatgatgacggtaccgtcagaagaagcaccggctaacttcgtgccagcagccgcggtaat

SEQ ID NO: 10306 - DNA, 490 bp, unidentified
  misc_feature 1..490: note = Ascusbbf_1373276, encodes 16S rRNA
  source 1..490: mol_type = genomic DNA
agagtttgatcctggctcaggatgaacgctagctacaggcttaacacatgcaagtcgaggggcagcataacgaaagcttgcttttgttgatggcgaccggcgcacgggtgagtaacgcgtatccaaccttccccttagtagggcatagcccggcgaaagtcggcttaataccctatgttttccgttgaggacatctgaagtggaataaagatttatcgctaagggatggggatgcgtctgattatgttgttggcggggtcacggcccaccaagccatcgatcagtaggggttctgagaggacggtctcgcacatgggtacggtgagacagaccaaaatccgaaggggggcagcagtgaggaagattggtcaaggggcgagtgcctgaaccagccaagtagcgtgcaggaggacggccgtatgggttgtaaactgcttttgcatgggaataaagtgagggacgtggccctttttgtctgtaccatgagaat

SEQ ID NO: 10307 - DNA, 490 bp, unidentified
  misc_feature 1..490: note = Ascusbbf_1340989, encodes 16S rRNA
  source 1..490: mol_type = genomic DNA
agagtttgatcctggctcaggatgaacgctagcggcaggcttaacacatgcaagtcgaggggcagcgcggggtagcaatactctggcggcgaccggcggaagggtgcgtaacgcgtgagcaacttgcccgtcactgggggataggcactggaaacggtgtgtaatactccataacatatggattcacatggattcatattgaaagattcgttggtgacggatgggctcgcgtaacattagctagtcggcggggtaacggcccaccgaggctacgatgtttaggggttctgagaggaaggtcacgcgctgtggagatgagaagcggtccaggctccgacggaaggcagcagtgaggaatattggtcaatggacggaagcctgaaccagccatgccgcgtgcaggaataaggccctatgggtcgtaaactgcttttccttgagagaaataagggtcacgtgtggtccgatgagagtatcaggggaataagca

SEQ ID NO: 10308 - DNA, 490 bp, unidentified
  misc_feature 1..490: note = Ascusbbf_1324670, encodes 16S rRNA
  source 1..490: mol_type = genomic DNA
agagtttgatcctggctcagaacgaacgctggcggcaggcttaacacatgcaagttggacgggaatcgattgatagcttgctattgattgaggagagtagcgcacgggtgagtaacacgtgggaacataccttatagtgggggataacaattggaaacgattgataataccgcataagtcctaagggagaaaggagtaattcgctataagattggcccgcggaagattaggcagttggtggggtaaaggcctaccacacctacgctctatagctggtctgagaggacgataagccacattggtactacgacacggcccaatgagcaacagtgggcagcagtgaggaatattgggcaacggagtcaaccctgacacagccacgccgcgggagtgaagaaggttttcgacgtgtaaagcgcgttcggaggtgaagatgatgaaggtagcatctaaagaagccccggcaaacttcgtgccagcagccgcggta

SEQ ID NO: 10309 - DNA, 490 bp, unidentified
  misc_feature 1..490: note = Ascusbbf_1324756, encodes 16S rRNA
  source 1..490: mol_type = genomic DNA
agagtttgatcctggctcagggtgaacgctagcggcaggcttaacacatgcaagtcgaggggcagcgcggggtagcaatactctgtcggcgaccggcgcacgggtgcgtaacgcgtgagcaacttgcccgtcactgggggttaggcactggcaacggtgtgtaataccccataatatatggattcacatggattcatattgaaagattcgttggtgacggatgggctcgcgtaacattggctattctgcggggtaacggcccaccgaggctacgatgtttagtggttctgcgaggaaaggcccccacactggaactgagacacggtccagactcctacgggaggcagcagtgaggaatattggtcaatgggcggaagcctgaaccagccatgcagcgtgcaggaataaggccctatgggtcgtaaactgcttttccttgagggcaataagggtcacgtgtggcccgatgagagtatcaggggaataagca

SEQ ID NO: 10310 - DNA, 490 bp, unidentified
  misc_feature 1..490: note = Ascusbbf_1324754, encodes 16S rRNA
  source 1..490: mol_type = genomic DNA
agagtttgatcatggctcaggataaacgctggcggcgcacataagacatgcaagtcgaacggccttaactcattcttcacgattgagagcggttagtggcggaccggtgagtaatgtataagtaacctgcctatcagaggggaacaacagttggaaacgactgctaataccgcatatgccacgagaatcacatggttcaagtgggaaaggagcaatccgctgatagatggacttatatctgattagctagttggtggggtaacggcctaccaaggcgacgatcagtagccggactgagaggtgaaacggccacaatgggactgagatacggaccagactccgacgggaagaagcagtcggggatattgcgcaatggaggaaactctgacgcagtgacgccgagggcaggaagaaggttttcggattgtaaactgctttagaaagggaagaaaaaagacagtaccgggagaataagctccggctaactacg

SEQ ID NO: 10311 - DNA, 490 bp, unidentified
  misc_feature 1..490: note = Ascusbbf_1324752, encodes 16S rRNA
  source 1..490: mol_type = genomic DNA
agagtttgatcctggctcaggatgaacgctagcggcaggcttaacacatgcaagtcgaggggcagcgcggggtagcaatactctggcggcgaccggcggaagggggcgtaacgcgtgagcaacaggcccgtggcagggggataagcgagggatacggcggctaagaccccgtaacaacagacctcgcatggggtgtgtttgaaagcttcggcggccacggattggctcgcgtcccattaggcagttggcggggtaacggcccaccaaaccgacgatggggagggggtctgcgaggcaggtacaacacactggaacggagtctcgctccatactactacgggcggcagccgtgcggactattggtccctgggcggcagcctgccccagccctgccgcgtgcaggaataaggccctacgggtcgtaaactgcttttgtacgggagcaatccgggtcacgagtggcctgctgagcgtaccgtacgaataagca

SEQ ID NO: 10312 - DNA, 485 bp, unidentified
  misc_feature 1..485: note = Ascusbbf_1340983, encodes 16S rRNA
  source 1..485: mol_type = genomic DNA
agagtttgatcgggagcagaacgaacgagggcggcagggcttaggcaggaaagtcgaacggacgacagagtggcgggccattctgaagttaggggcgcacgagggaggaacgcgggggaaacggcccttcactggggaagaaaggcgggaaacggacgctaataccgcagacgcccgcaaggggaaagaggtatcggtgatggaggtgcccgcgttggattagctggttggtggggtaatggcctaccaaggcgatgatccatagctggtcggagaggacgatcagccacgctggaacggggccacggtccagactcctacgggaggccgccgctcagactcttgggcactggaggaacctctgcccccgccctgccgcgtgaatgaagacggccttcgggttgtaaagttcttttagtcatgaagatgatgaccgtcgtgacagaacacgccccggctaacttcgtgccagcagccgcggtaat

SEQ ID NO: 10313 - DNA, 490 bp, unidentified
  misc_feature 1..490: note = Ascusbbf_1324709, encodes 16S rRNA
  source 1..490: mol_type = genomic DNA
agagtttgatcatggctcaggatgaacgctagctacaggcttaacacatgcaagtcgaggggcagcataacgaaagcttgcttttgttgatggcgaccggcgcacgggtgagtaacgcgtatccaaccttccccttagtagggcatagcccggcgaaagtcggattaataccctatgttatccgtcgaggacatcagaagtggattaaagatttatcgctaagggatggggatgcgtctgatgaggttgttggcggggtaacggcccaccgagccatcgatcagtaggggttctgagagtacggtcacgatcgtagggactgcgcgacggaccaaactcgtacgggaggaagcagtaaggaagattggtcaatgagcgagagcctgaaccaggcaagttgcgtgaagaatgacggcccgatgggtggtaaactgcttttgcatgggaataaagtgagggacgtggccctttttgtatgtaccatgagaat

SEQ ID NO: 10314 - DNA, 490 bp, unidentified
  misc_feature 1..490: note = Ascusbbf_915, encodes 16S rRNA
  source 1..490: mol_type = genomic DNA
agagtttgatcctggctcaggatgaacgctagctacaggcttaacacatgcaagtcgaggggcagcatgaagtcagcttgctgactttgatggcgaccggcgcacgggtgcgtaacacgtatccaatctacccatggctcagggatagcctttcgaaagaaagattaatacctgatggtctgtgattgagacatctcgaacacagtaaagattaatcggcgatggatgaggatgcgtctgattagatagtaggcggggtaacggcccacctagtcgacgatcagtaggggttctgagaggaaggtcccccacattggaactgagacacggtccaaactcctacgggaggcagcagtgaggaatattggtcaatggacgagagtctgaaccagccaagtagcgtgaaggaagactgccctatgggttgtaaacttcttttgtttgggaataaagtgggccacgtgtggccttttgtatgtaccatacgaat

SEQ ID NO: 10315 - DNA, 490 bp, unidentified
  misc_feature 1..490: note = Ascusbbf_8941, encodes 16S rRNA
  source 1..490: mol_type = genomic DNA
agagtttgatcctggctcaggatgaacgctagctacaggcttaacacatgcaagtcgaggggcagcatgggggttgcttgcaacttccgatggcgaccggcgcacgggtgagtaacgcgtatccaaccttccccatagtaggggatagcccgtagaaatgcggattaataccctatgttctccgaagaggacatctgatttggagtaaagatttatcgctatgggatggggatgcgtctgattaggctgcaggcggggtaacggcccacctggcctacgatcagtaggggttctgagaggaaggtcccccacactggtactgagacacggaccagactcctacgggaggcagcagtgaggaatattggtcaatgggcgtaagcctgaaccagccaagtagcgtgagggatgacggccctacgggttgtaaacctcttttgttcgggaataacgtgcggcacgcgtgccgctttgcatgtaccgttcgaat

SEQ ID NO: 10316 - DNA, 490 bp, unidentified
  misc_feature 1..490: note = Ascusbbf_8480, encodes 16S rRNA
  source 1..490: mol_type = genomic DNA
agagtttgatcatggctcaggacgaacgctggcggcgtgcttaacacatgcaagtcgaacggagtgaaggggagcttgctccttggaacttagtggcaaacgggtgagtaacgcgtaggcaacctgcccttcagatggggacaacatttcgaaaggaatgctaataccgaatgacgtgcattggtcgcatgaccgatgcaccaaaggccgggcaaccggtcactgaaggatgggcctgcgtctgattagctagttggtggggtaacggcccaccaaggcgacgatcagtagccggtctgagaggatgaacggccacattgggactgagacacggcccaaactcctacgggaggcagcagtggggaatcttccgcaatgggcgcaagcctgacggagcaacgccgcgtgagtgaagaaggttttcggatcgtaaagctctgttgtcagggacgagagacttgatcaggaaatgggtcaaggaggacggtac

SEQ ID NO: 10317 - DNA, 490 bp, unidentified
  misc_feature 1..490: note = Ascusbbf_374, encodes 16S rRNA
  source 1..490: mol_type = genomic DNA
agagtttgatcctggctcaggatgaacgctagctacaggcttaacacatgcaagtcgaggggcagcatagcggaagcttgcttctgctgatggcgaccggcgcacgggtgagtaacgcgtatccaaccttccctacagtaggggatagcccggcgaaagtcggattaataccctatgttcttcttcgatgacatctgaggagaagcaaaggttcaccgctataggatggggatgcgtctgattagcttgttggcggggtaacggcccaccaaggctacgatcagtaggggttctgagaggaaggtcccccacattggtactgagacacggaccaaactcctacgggaggcagcagtgaggaatattggtcaatgggcgagagcctgaaccagccaagtagcgtgcaggatgactgccctatgggttgtaaactgcttttatgcgggaataaagtcgggcacgtgtgcctgtttgtatgtaccgcatgaat

SEQ ID NO: 10318 - DNA, 490 bp, unidentified
  misc_feature 1..490: note = Ascusbbf_6906, encodes 16S rRNA
  source 1..490: mol_type = genomic DNA
agagtttgatcatggctcaggatgaacgctagctacaggcttaacacatgcaagtcgaggggcagcgaagagttagcttgctaattctgtcggcgaccggcgcacgggtgagtaacgcgtatccaaccttccccttagtagggcatagcccggcgaaagtcggattaataccctatgttgttcatcgcaggcatctaaagtgaaccaaagatttattgctaagggatggggatgcgtctgattaggttgttggcggggtaacggcccaccaagccttcgatcagtaggggttctgagaggaaggtcccccacattggaactgagacacggtccaaactcctacgggaggcagcagtgaggaatattggtcaatggacggaagtctgaaccagccaagtagcgtgcaggatgacggccctatgggttgtaaactgcttttgtcagggaataaagttaggcacgtgtgcttatttgtatgtacctgaagaat

SEQ ID NO: 10319 - DNA, 490 bp, unidentified
  misc_feature 1..490: note = Ascusbbf_721, encodes 16S rRNA
  source 1..490: mol_type = genomic DNA
agagtttgatcatggctcaggatgaacgctagctacaggcttaacacatgcaagtcgaggggcagcatgattctagcttgctagaattgatggcgaccggcgcacgggtgagtaacgcgtatccaaccttccctatagtagaggatagcccggcgaaagtcggattaatactctatgttgttcaatgcggacatctaagttgaaccaaaggtttaccgctataggatggggatgcgtctgattagatggtaggcggggtaacggcccacctagtcgacgatcagtaggggttctgagaggaaggtcccccacattggaactgagacacggtccaaactcctacgggaggcagcagtgaggaatattggtcaatgggcgagagcctgaaccagccaagtagcgtgcaggatgacggccctatgggttgtaaactgcttttatacggggataaagtgagggacgtgtccctttttgtaggtaccgtatgaat

SEQ ID NO: 10320 - DNA, 490 bp, unidentified
  misc_feature 1..490: note = Ascusbbf_3819, encodes 16S rRNA
  source 1..490: mol_type = genomic DNA
agagtttgatcatggctcaggatgaacgctggcggcgtgcttaacacatgcaagtcgagcgaagctcctttgttgatttcttcggattgattcaaaggatgactgagcggcggacgggtgagtaacgcgtggagaacctgccccgtaccgggggataacagttagaaatgactgctaataccgcataagcgcacactatcgcatgatagagtgtgaaaaactccggtggtacgggatggctccgcgttggattagccagttggcggggtaacggcccaccaaagcgacgatccatagccggcctgagagggcgaccggccacattgggactgagacacggcccaaactcctacgggaggcagcagtggggaatattgcacaatgggggaaaccctgatgcagcgacgccgcgtgaacgaagaagtatttcggtatgtaaagttctatcagcagggaagaaaatgacggtacctgactaagaagccccggc

SEQ ID NO: 10321 - DNA, 490 bp, unidentified
  misc_feature 1..490: note = Ascusbbf_4323, encodes 16S rRNA
  source 1..490: mol_type = genomic DNA
agagtttgatcatggctcaggatgaacgctagctacaggcttaacacatgcaagtcgaggggcagcatgagggtagcaatacctttgatggcgaccggcgcacgggtgcgtaacacgtatccaatctacccatggctcgggaatagcctttcgaaagaaagattaatgcccgatggtctgcgattgagacatctcgattacagtaaagatttatcggcgatggatgaggatgcgtccgattaggtagtaggcggggtaacggcccacctagccgacgatcggtaggggttctgagaggaaggtcccccacattggaactgagacacggtccaaactcctacgggaggcagcagtgaggaatattggtcaatgggcgcgagcctgaaccagccaagtagcgtgagggatgactgccctatgggttgtaaacctcttttgtttgggaataaagtgtcctacgagtaggattttgtatgtacctgacgaataa

SEQ ID NO: 10322 - DNA, 490 bp, unidentified
  misc_feature 1..490: note = Ascusbbf_6087, encodes 16S rRNA
  source 1..490: mol_type = genomic DNA
agagtttgatcatggctcaggatgaacgctagctacaggcttaacacatgcaagtcgaggggcatcaggattctagcttgctagaattgctggcgaccggcgcacgggtgagtaacgcgtatccaacctggcccttagtagaggatagcccggcgaaagtcggattaatactctatgttctccaatgcgggcatctaatttggagcaaagatttatcgctatgggatggggatgcgtctgattagcttgtcggcggggtaacggcccaccgaggcaacgatcagtaggggttctgagaggaaggtcccccacattggtactgagacacggaccaaactcctacgggaggcagcagtgaggaatattggtcaatggacgcgagtctgaaccagccaagtagcgtgcaggatgactgccctatgggttgtaaactgcttttataggggaataaagtgaggcacgtgtgcctttttgtatgtaccctatgaat

SEQ ID NO: 10323 - DNA, 490 bp, unidentified
  misc_feature 1..490: note = Ascusbbf_8414, encodes 16S rRNA
  source 1..490: mol_type = genomic DNA
agagtttgatcatggctcaggacgaacgctggcggcgtgcttaacacatgcaagtcgtgcgaggatgtgattggaaggtcttcggaccggaagattgcatccgagcggcggacgggtgagtaacgcgtgagcaacctgccttcaacagggggataacgcatcgaaagatgtgctaataccgcgtaagaccacggcatcacatggtgcaggggtcaaaggagcaatccggttgaagatgggctcgcgtccgattagccagttggtgaggtaacggcccaccaaagcaacgatcggtagccgacctgagagggtgatcggccacattggaactgagacacggtccagactcctacgggaggcagcagtggggaatattgggcaatgggcgaaagcctgacccagcaacgccgcgtgagggaagaagggtttcggctcgtaaacctctgtcctaaagggcgaagaaaatgacggtactttaggaggaagcccc

SEQ ID NO: 10324 - DNA, 300 bp, unidentified
  misc_feature 1..300: note = Ascusbbf_6176A, encodes 16S rRNA
  source 1..300: mol_type = genomic DNA
agagtttgatcatggctcaggatgaacgctagctacaggcttaacacatgcaagtcgaggggcagcatgatcgaagcttgctttgattgatggcgaccggcgcacgggtgagtaacgcgtatccaaccttccctatagtagaggatagcccggcgaaagtcggattaatactctatgttttccaatgcagacatctaagttggaacaaaggttcaccgctataggatggggatgcgtctgattaggttgttggcggggtaacggcccaccaagcctacgatcagtaggggttctgagagg

SEQ ID NO: 10325 - DNA, 300 bp, unidentified
  misc_feature 1..300: note = Ascusbbf_6176B, encodes 16S rRNA
  source 1..300: mol_type = genomic DNA
agagtttgatcatggctcaggatgaacgctagctacaggcttaacacatgcaagtcgaggggcagcatgacgatagcttgctattgttgatggcgaccggcgcacgggtgagtaacgcgtatccaaccttccctatagtagaggatagcccggcgaaagtcggattaatactctatgttttccaatgcagacatctaagttggaacaaaggtttaccgctataggatggggatgcgtctgattagatagtaggcggggtaacggcccacctagtcgacgatcagtaggggttctgagagg

SEQ ID NO: 10326 - DNA, 300 bp, unidentified
  misc_feature 1..300: note = Ascusbbf_6176C, encodes 16S rRNA
  source 1..300: mol_type = genomic DNA
agagtttgatcatggctcaggatgaacgctagctacaggcttaacacatgcaagtcgaggggcagcatgatcgaagcttgctttgattgatggcgaccggcgcacgggtgagtaacgcgtatccaaccttccctatagtagaggatagcccggcgaaagtcggattaatactctatgttttccaatgcagacatctaagttggaacaaaggttcaccgctataggatggggatgcgtctgattaggtagtcggcggggtaacggcccaccgagccaacgatcagtaggggttctgagagg

SEQ ID NO: 10327 - DNA, 300 bp, unidentified
  misc_feature 1..300: note = Ascusbbf_6176D, encodes 16S rRNA
  source 1..300: mol_type = genomic DNA
agagtttgatcatggctcaggatgaacgctagctacaggcttaacacatgcaagtcgaggggcagcatgatctaagcttgcttagattgatggcgaccggcgcacgggtgagtaacgcgtatccaaccttccctatagtagaggatagcccggcgaaagtcggattaatactctatgttttccaatgcagacatctaagttggaacaaaggttcaccgctataggatggggatgcgtctgattagatagtaggcggggtaacggcccacctagtcgacgatcagtaggggttctgagagg

SEQ ID NO: 10328 - DNA, 300 bp, unidentified
  misc_feature 1..300: note = Ascusbbf_6176E, encodes 16S rRNA
  source 1..300: mol_type = genomic DNA
agagtttgatcatggctcaggatgaacgctagctacaggcttaacacatgcaagtcgaggggcagcatgatctaagcttgcttagattgatggcgaccggcgcacgggtgagtaacgcgtatccaaccttccctatagtagaggatagcccggcgaaagtcggattaatactctatgttttccaatgcagacatctaagttggaacaaaggttcaccgctataggatggggatgcgtctgattagattgtaggcggggtaacggcccacctagtcgacgatcagtaggggttctgagagg

SEQ ID NO: 10329 - DNA, 301 bp, unidentified
  misc_feature 1..301: note = Ascusbbf_6176F, encodes 16S rRNA
  source 1..301: mol_type = genomic DNA
agagtttgatcatggctcaggatgaacgctagctacaggcttaacacatgcaagtcgaggggcagcatgatcgaagcttgctttgattgatggcgaccggcgcacgggtgagtaacgcgtatccaaccttccctatagtagaggatagcccggcgaaagtcggattaatactctatgttttccaatgcagacatctaagttggaacaaaggttcaccgctataggatggggatgcgtctgattaggtagtaggcgggttaacggcccacctagccgacgatcagtaggggttctgagagga

SEQ ID NO: 10330 - DNA, 300 bp, unidentified
  misc_feature 1..300: note = Ascusbbf_6176G, encodes 16S rRNA
  source 1..300: mol_type = genomic DNA
agagtttgatcctggctcaggatgaacgctagctacaggcttaacacatgcaagtcgaggggcagcatgatctaagcttgcttagattgatggcgaccggcgcacgggtgagtaacgcgtatccaaccttccctatagtagaggatagcccggcgaaagtcggattaatactctatgttttccaatgcagacatctaagttggaacaaaggtttaccgctataggatggggatgcgtctgattagatagtaggcggggtaacggcccacctagtcgacgatcagtaggggttctgagagg

SEQ ID NO: 10331 - DNA, 300 bp, unidentified
  misc_feature 1..300: note = Ascusbbf_6176H, encodes 16S rRNA
  source 1..300: mol_type = genomic DNA
agagtttgatcatggctcaggatgaacgctagctacaggcttaacacatgcaagtcgaggggcagcatgatctaagcttgcttagattgatggcgaccggcgcacgggtgagtaacgcgtatccaaccttccctatagtagaggatagcccggcgaaagtcggattaatactctatgttttccaatgcagacatctaaaatggaataaaggtttaccgctataggatggggatgcgtctgattagatagtaggcggggtaacggcccacctagtcgacgatcagtaggggttctgagagg

SEQ ID NO: 10332 - DNA, 300 bp, unidentified
  misc_feature 1..300: note = Ascusbbf_6176I, encodes 16S rRNA
  source 1..300: mol_type = genomic DNA
agagtttgatcctggctcaggatgaacgctagctacaggcttaacacatgcaagtcgaggggcagcatgatcgaagcttgctttgattgatggcgaccggcgcacgggtgagtaacgcgtatccaaccttccctatagtagaggatagcccggcgaaagtcggattaatactctatgttttccaatgcagacatctaaaatggaacaaaggtttaccgctataggatggggatgcgtctgattagatagtaggcggggtaacggcccacctagtcgacgatcagtaggggttctgagagg

SEQ ID NO: 10333 - DNA, 301 bp, unidentified
  misc_feature 1..301: note = Ascusbbf_4883A, encodes 16S rRNA
  source 1..301: mol_type = genomic DNA
agagtttgatcctggctcaggatgaacgctagctacaggcttaacacatgcaagtcgaggggcagcatattggtagcttgctaccaatgatggcgaccggcgcacgggtgagtaacgcgtatccaaccttccccatagtagggcatagcccgtagaaatgcggattaataccctatgttttccgaagatgacatctgatttggaacaaaggttcaccgctataggatggggatgcgtctgattagcttgttggcggggtaacggcccaccaaggcgacgatcagtaggggttctgagagga

SEQ ID NO: 10334 - DNA, 300 bp, unidentified
  misc_feature 1..300: note = Ascusbbf_4883B, encodes 16S rRNA
  source 1..300: mol_type = genomic DNA
agagtttgatcctggctcaggatgaacgctagctacaggcttaacacatgcaagtcgaggggcagtatattggtagcttgctaccaatgatggcgaccggcgcacgggtgagtaacgcgtatccaaccttccccatagtagggcatagcccgtagaaatgcggattaataccctatgttttccgaagatgacatctgatttggaacaaaggttcaccgctatgggatggggatgcgtctgattaggtagtcggcggagtaacggcccaccgagccgacgatcagtaggggttctgagagg

SEQ ID NO: 10335 - DNA, 300 bp, unidentified
  misc_feature 1..300: note = Ascusbbf_4883C, encodes 16S rRNA
  source 1..300: mol_type = genomic DNA
agagtttgatcctggctcaggatgaacgctagctacaggcttaacacatgcaagtcgaggggcagcatattggtagcttgctaccaatgatggcgaccggcgcacgggtgagtaacgcgtatccaaccttccccatagtagggcatagcccgtagaaatgcggattaataccctatgttttccgaagatgacatctgatttggaacaaaggttcaccgctatgggatggggatgcgtctgattaggtagtcggcggggtaacggcccaccgagccgacgatcagtaggggttctgagagg

SEQ ID NO: 10336 - DNA, 301 bp, unidentified
  misc_feature 1..301: note = Ascusbbf_4883D, encodes 16S rRNA
  source 1..301: mol_type = genomic DNA
agagtttgatcctggctcaggatgaacgctagctacaggcttaacacatgcaagtcgaggggcagcatattggtagcttgctaccaatgatggcgaccggcgcacgggtgagtaacgcgtatccaaccttccccatagtagggcatagcccgtagaaatgcggattaataccctatgttttccgaagatgacatctgatttggaacaaaggttcaccgctatgggatggggatgcgtctgattaggtagtcggcggggtaacggcccaccgagccgacggtcagtaggggttctgagagga

SEQ ID NO: 10337 - DNA, 300 bp, unidentified
  misc_feature 1..300: note = Ascusbbf_4883E, encodes 16S rRNA
  source 1..300: mol_type = genomic DNA
agagtttgatcatggctcaggatgaacgctagctacaggcttaacacatgcaagtcgaggggcagcatattggtagcttgctaccaatgatggcgaccggcgcacgggtgagtaacgcgtatccaaccttccccatagtagggcatagcccgtagaaatgcggattaataccctatgttttccgaagatgacatctgatttggaacaaaggttcaccgctatgggatggggatgcgtctgattaggtagtcggcggggtaacggcccaccgagccgacgatcagtaggggttctgagagg

SEQ ID NO: 10338 - DNA, 300 bp, unidentified
  misc_feature 1..300: note = Ascusbbf_13543A, encodes 16S rRNA
  source 1..300: mol_type = genomic DNA
agagtttgatcatggctcaggacgaacgctggcggcgtgcttaacacatgcaagtcgaacggggcaattaaaagcttgcttttgaaagcctagtggcaaacgggtgagtaacgcgtaggcaacctacccttgggatggggacaacaggacgaaagccctgctaataccgaatgaagcatcccttccgcatggaggggatatgaaagatggcctctacttgtaagctatcacccagggatgggcctgcgtctgattagccagttggcggggtaacggcccaccaaagcgacgatcagtagc

SEQ ID NO: 10339 - DNA, 301 bp, unidentified
  misc_feature 1..301: note = Ascusbbf_13543B, encodes 16S rRNA
  source 1..301: mol_type = genomic DNA
agagtttgatcctggctcaggacgaacgctggcggcgtgcttaacacatgcaagtcgaacgggattgattgaaagcttgcttttgagagatctagtggcaaacgggtgagtaacgcgtaggcaacctacccttgggatggggacaacaggacgaaagccctgctaataccgaatgaagcatcccttccgcatggaggggatatgaaagatggcctctacttgtaagctatcacccagggatgggcctgcgtctgattagccagttggcggggtaacggcccaccaaagcgacgatcagtag

SEQ ID NO: 10340 - DNA, 299 bp, unidentified
  misc_feature 1..299: note = Ascusbbf_13543C, encodes 16S rRNA
  source 1..299: mol_type = genomic DNA
agagtttgatcatggctcaggacgaacgctggcggcgtgcttaacacatgcaagtcgaacggggcaatcgaaagcttgcttttgaaagcctagtggcaaacgggtgagtaacgcgtaggcaacctacccttgggatggggacaacaggacgaaagccctgctaataccgaatgaagcatcccttccgcatggaggggatatgaaagatggcctctacttgtaagctatcacccagggatgggcctgcgtctgattagccagttggcggggtaacggcccaccaaagcgacgatcagtag

SEQ ID NO: 10341 - DNA, 301 bp, unidentified
  misc_feature 1..301: note = Ascusbbf_13543D, encodes 16S rRNA
  source 1..301: mol_type = genomic DNA
agagtttgatcctggctcaggatgaacgctggcggcgtgcctaatacatgcaagtcgagcgaaccacttcggtggtgagcggcgaacgggtgagtaacacgtaggtgatctgcccatcagacggggacaacgattggaaacgatcgctaataccggataggacgaaagtttaaaggtgcttctggcaccgctgatggatgagcctgcggcgcattagctagttggtagggtaaaggcctaccaaggcgacgatgcgtagccgacctgagagggtgaacggccacactgggactgagacacg

SEQ ID NO: 10342 - DNA, 299 bp, unidentified
  misc_feature 1..299: note = Ascusbbf_13543E, encodes 16S rRNA
  source 1..299: mol_type = genomic DNA
agagtttgatcctggctcaggacgaacgctggcggcgtgcttaacacatgcaagtcgaacggggcaatcgaaagcttgcttttgaaagcctagtggcaaacgggtgagtaacgcgtaggcaacctacccttgggatggggacaacaggacgaaagccctgctaataccgaatgaagcatcccttccgcatggaggggatatgaaagatggcctctacttgtaagctatcacccagggatgggcctgcgtctgattagccagttggcggggtaacggcccaccaaagcgacgatcagtag

SEQ ID NO: 10343 - DNA, 300 bp, unidentified
  misc_feature 1..300: note = Ascusbbf_152A, encodes 16S rRNA
  source 1..300: mol_type = genomic DNA
agagtttgatcctggctcaggacgaacgctggcggcgtgcttaacacatgcaagtcgaacgagaatccgtggaaagagttttcggacaatggaagcggaggaaagtggcggacgggtgagcaacgcgtgaggaacctgccttggagagggggacaacagctggaaacggctgctaataccgcatgatgcattggagtcgcatggctctgatgccaaagatttatcgctctgagatggcctcgcgtctgattagatagttggcggggtaacggcccaccaagtcgacgatcagtagccgga

SEQ ID NO: 10344 - DNA, 300 bp, unidentified
  misc_feature 1..300: note = Ascusbbf_152B, encodes 16S rRNA
  source 1..300: mol_type = genomic DNA
agagtttgatcatggctcaggacgaacgctggcggcgtgcttaacacatgcaagtcgaacgagaatccgtggaaagagttttcggacaatggaagcggaggaaagtggcggacgggtgagtaacgcgtgaggaacctgccttggagagggggacaacagctggaaacggctgctaataccgcatgatgcattggagtcgcatggctctgatgccaaagatttatcgctctgagatggcctcgcgtctgattagatagttggcggggtaacggcccaccaagtcgacgatcagtagccgga

SEQ ID NO: 10345 - DNA, 300 bp, unidentified
  misc_feature 1..300: note = Ascusbbf_152C, encodes 16S rRNA
  source 1..300: mol_type = genomic DNA
agagtttgatcctggctcaggacgaacgctggcggcgtgcttaacacatgcaagtcgaacgagaatccgtggaaagagttttcggacaatggaagcggaggaaagtggcggacgggtgagtaacgcgtgaggaacctgccttggagagggggacaacagctggaaacggctgctaataccgcatgatgcattggagtcgcatggctctgatgccaaagatttatcgctctgagatggcctcgcgtctgattagatagttggcggggtaacggcccaccaagtcgacgatcagtagccgga

SEQ ID NO: 10346 - DNA, 300 bp, unidentified
  misc_feature 1..300: note = Ascusbbf_707A, encodes 16S rRNA
  source 1..300: mol_type = genomic DNA
agagtttgatcctggctcaggatgaacgctagctacaggcttaacacatgcaagtcgaggggcagcgagaggaaagcttgctttccttgtcggcgaccggcgcacgggtgagtaacgcgtatccaaccttccccttagtagggcatagcccggcgaaagtcggattaataccctatgttttccgatgaggacatctgagctggaacaaagatttatcgctaagggatggggatgcgtctgattaggtagtcggcggggtaacggcccaccgagcctacgatcagtaggggttctgagagg

SEQ ID NO: 10347 - DNA, 300 bp, unidentified
  misc_feature 1..300: note = Ascusbbf_707B, encodes 16S rRNA
  source 1..300: mol_type = genomic DNA
agagtttgatcatggctcaggatgaacgctagctacaggcttaacacatgcaagtcgaggggcagcgagaggaaagcttgctttccttgtcggcgaccggcgcacgggtgagtaacgcgtatccaaccttccccttagtagggcatagcccggcgaaagtcggattaataccctatgttttccgatgaggacatctgagctggaacaaagatttatcgctaagggatggggatgcgtctgattaggtagtcggcggggtaacggcccaccgagcctacgatcagtaggggttctgagagg

SEQ ID NO: 10348 - DNA, 301 bp, unidentified
  misc_feature 1..301: note = Ascusbbf_707C, encodes 16S rRNA
  source 1..301: mol_type = genomic DNA
agagtttgatcatggctcaggatgaacgctagctacaggcttaacacatgcaagtcgaggggcagcgagagggaagcttgctttccttgtcggcgaccggcgcacgggtgagtaacgcgtatccaaccttccccttagtagggcatagcccggcgaaagtcggattaataccctatgttttccgatgaggacatctgagctggaacaaagatttatcgctaagggatggggatgcgtctgattaggttgttggcggggtaacggcccaccaagcctgcgatcagtaggggttctgagagga

SEQ ID NO: 10349 - DNA, 300 bp, unidentified
  misc_feature 1..300: note = Ascusbbf_707D, encodes 16S rRNA
  source 1..300: mol_type = genomic DNA
agagtttgatcctggctcaggatgaacgctagctacaggcttaacacatgcaagtcgaggggcagcgagaagaaagcttgctttctttgtcggcgaccggcgcacgggtgagtaacgcgtatccaaccttccccttagtagggcatagcccggcgaaagtcggattaataccctatgttttccaatgaggacatctgagctggaacaaagatttatcgctaagggatggggatgcgtctgattaggtagtcggcggggtaacggcccaccgagcctgcgatcagtaggggttctgagagg

SEQ ID NO: 10350 - DNA, 300 bp, unidentified
  misc_feature 1..300: note = Ascusbbf_707E, encodes 16S rRNA
  source 1..300: mol_type = genomic DNA
agagtttgatcctggctcaggatgaacgctagctacaggcttaacacatgcaagtcgaggggcatcgagaagaaagcttgctttctttgtcggcgaccggcgcacgggtgagtaacgcgtatccaaccttccccttagtagggcatagcccggcgaaagtcggattaataccctatgttttccgttgaggacatctgaagtggaacaaagattcatcgctaagggatggggatgcgtctgattaggtagtcggcggggtaacggcccaccgagccaacgatcagtaggggttctgagagg

SEQ ID NO: 10351 - DNA, 300 bp, unidentified
  misc_feature 1..300: note = Ascusbbf_707F, encodes 16S rRNA
  source 1..300: mol_type = genomic DNA
agagtttgatcctggctcaggatgaacgctagctacaggcttaacacatgcaagtcgaggggcatcgagaggaaagcttgctttccttgtcggcgaccggcgcacgggtgagtaacgcgtatccaaccttccccttagtagggcatagcccggcgaaagtcggattaataccctatgttttccgatgaggacatctgagctggaacaaagatttatcgctaagggatggggatgcgtctgattaggttgttggcggggtaacggcccaccaagcctacgatcagtaggggttctgagagg

SEQ ID NO: 10352 - DNA, 300 bp, unidentified
  misc_feature 1..300: note = Ascusbbf_707G, encodes 16S rRNA
  source 1..300: mol_type = genomic DNA
agagtttgatcctggctcaggatgaacgctagctacaggcttaacacatgcaagtcgaggggcatcgagaggaaagcttgctttccttgtcggcgaccggcgcacgggtgagtaacgcgtatccaaccttccccttagtagggcatagcccggcgaaagtcggattaataccctatgttttccgatgaggacatctgagctggaataaagatttatcgctaagggatggggatgcgtctgattaggtagtcggcggggtaacggcccaccgagccaacgatcagtaggggttctgagagg

SEQ ID NO: 10353 - DNA, 300 bp, unidentified
  misc_feature 1..300: note = Ascusbbf_707H, encodes 16S rRNA
  source 1..300: mol_type = genomic DNA
agagtttgatcatggctcaggatgaacgctagctacaggcttaacacatgcaagtcgaggggcatcgagaggaaagcttgctttccttgtcggcgaccggcgcacgggtgagtaacgcgtatccaaccttccccttagtagggcatagcccggcgaaagtcggattaataccctatgttttccgatgaggacatctgagctggaacaaagatttatcgctaagggatggggatgcgtctgattaggttgttggcggggtaacggcccaccaagcctacgatcagtaggggttctgagagg

SEQ ID NO: 10354 - DNA, 300 bp, unidentified
  misc_feature 1..300: note = Ascusbbf_707I, encodes 16S rRNA
  source 1..300: mol_type = genomic DNA
agagtttgatcctggctcaggatgaacgctagctacaggcttaacacatgcaagtcgaggggcagcgagaggaaagcttgctttccttgtcggcgaccggcgcacgggtgagtaacgcgtatccaacctggcccttagtaggggatagcccggcgaaagtcggattaataccctatgttttcctatgaggacatctgagcaggaacaaagatttatcgctaagggatggggatgcgtctgattagcttgtcggcggggtaacggcccaccgaggctacgatcagtaggggttctgagagg

SEQ ID NO: 10355 - DNA, 300 bp, unidentified
  misc_feature 1..300: note = Ascusbbf_707J, encodes 16S rRNA
  source 1..300: mol_type = genomic DNA
agagtttgatcctggctcaggatgaacgctagctacaggcttaacacatgcaagtcgaggggcagcgagaggaaagcttgctttccttgtcggcgaccggcgcacgggtgagtaacgcgtatccaaccttccccttagtagggcatagcccggcgaaagtcggattaataccctatgttttccaatgaggacatctgagctggaacaaagatttatcgctaagggatggggatgcgtctgattaggtagtcggcggggtaacggcccaccgagcctacgatcagtaggggttctgagagg

SEQ ID NO: 10356 - DNA, 301 bp, unidentified
  misc_feature 1..301: note = Ascusbbf_1238A, encodes 16S rRNA
  source 1..301: mol_type = genomic DNA
agagtttgatcctggctcagaacgaacgctggtggagtgtcttatacatgcaagtcgagcgaggacgtagcaatacgagccgagcggcgaatgggtgagtaacgcgtaagcaatctgccccgcattccggaacaaccgtgccaacgcgcggctaatgccgggagccgtggcggtccacatgggccgttgacgaaagatttatcgatgcgggatgagcttgcgtccgattagctagttggcggggcaacggcccaccaaggcgacgatcggtagccggcctgagagggcgatcggccacatt

SEQ ID NO: 10357 - DNA, 301 bp, unidentified
  misc_feature 1..301: note = Ascusbbf_1238B, encodes 16S rRNA
  source 1..301: mol_type = genomic DNA
agagtttgatcctggctcagaacgaacgctggtggagtgtcttatacatgcaagtcgagcgaggacgtagcaatacgagccgagcggcgaatgggtgagtaacgcgtaagcaatctgccctgcattccggaacaaccgtgccaacgcgcggctaatgccgggagtcgtggtagtccacatggacgattgacgaaagatttatcgatgcaggatgagcttgcgtccgattagctagttggcggggtaacggcccaccaaggcgacgatcggtagccggcctgagagggcgatcggccacatt

SEQ ID NO: 10358 - DNA, 301 bp, unidentified
  misc_feature 1..301: note = Ascusbbf_1238C, encodes 16S rRNA
  source 1..301: mol_type = genomic DNA
agagtttgatcatggctcaggacgaacgctggcggcgtgcttaacacatgcaagtcgaacgagacgatttagaagcttgcttttattgagtcgagtggcaaacgggtgagtaacgcgtagacaacctgccgcaaagatggggacaacagtccgaaaggactgctaataccgaatgttgtatctcctccgcatgaaagagatattaaagatggcctctacttgtaagctatcgctttgcgatgggtctgcgtctgattagctagttggtggggcaacggcctaccaaggcaacgatcagtag

SEQ ID NO: 10359 - DNA, 301 bp, unidentified
  misc_feature 1..301: note = Ascusbbf_1238D, encodes 16S rRNA
  source 1..301: mol_type = genomic DNA
agagtttgatcctggctcagaacgaacgctggtggagtgtcttatacatgcaagtcgagcgaggacgtagcaatacgagccgagcggcgaatgggtgagtaacgcgtaagcaatctgccccgcattccggaacagccgtgccaacgcgcggctaatgccgggagccgtggcggtccgcatgggccgttgacgaaagatttatcgatgcgggatgagcttgcgtccgattagctagttggcggggcaacggcccaccaaggcgacgatcggtagccggcctgagagggcgatcggccacatt

SEQ ID NO: 10360 - DNA, 301 bp, unidentified
  misc_feature 1..301: note = Ascusbbf_5588A, encodes 16S rRNA
  source 1..301: mol_type = genomic DNA
agagtttgatcctggctcaggatgaacgctagctacaggcttaacacatgcaagtcgaggggcagcatgacgagtgcttgcacttgttgatggcgaccggcgcacgggtgcgtaacgcgtatcgaaccttccccttactcgggaatagcccggtgaaaaccgaattaatgcccgatatatatttagatggcatcagaagagtatgaaagatttatcggtaagggatggcgatgcgtaggattaggtagtcggcggggtaacggcccaccgagcccacgatccttaggggttctgagaggaa

SEQ ID NO: 10361 - DNA, 300 bp, unidentified
  misc_feature 1..300: note = Ascusbbf_5588B, encodes 16S rRNA
  source 1..300: mol_type = genomic DNA
agagtttgatcctggctcaggatgaacgctagctacaggcttaacacatgcaagtcgaggggcagcatgacgatagcttgctattgttgatggcgaccggcgcacgggtgcgtaacgcgtatcgaaccttccccttactcgggaatagcccggtgaaaaccgaattaatgcccgatatatatttagatggcatcagaagagtatgaaagatttatcggtaagggatggcgatgcgtaggattaggtagtcggcggggtaacggcccaccgagcctacgatccttaggggttctgagagga

SEQ ID NO: 10362 - DNA, 300 bp, unidentified
  misc_feature 1..300: note = Ascusbbf_5588C, encodes 16S rRNA
  source 1..300: mol_type = genomic DNA
agagtttgatcatggctcaggatgaacgctagctacaggcttaacacatgcaagtcgaggggcagcatgacgagtgcttgcacttgttgatggcgaccggcgcacgggtgcgtaacgcgtatcgaaccttccccttactcgggaatagcccggtgaaaaccgaattaatgcccgatatatatttagatggcatcagaagagtatgaaagatttatcggtaagggatggcgatgcgtaggattaggtagtcggcggggtaacggcccaccgagcctacgatccttaggggttctgagagga

SEQ ID NO: 10363 - DNA, 301 bp, unidentified
  misc_feature 1..301: note = Ascusbbf_5588D, encodes 16S rRNA
  source 1..301: mol_type = genomic DNA
agagtttgatcctggctcaggatgaacgctagctacaggcttaacacatgcaagtcgaggggcagcatgacgagtgcttgcacttgttgatggcgaccggcgcacgggtgcgtaacgcgtatcgaaccttccccttactcgggaatagcccggtgaaaaccgaattaatgcccgatatatatttagatggcatcagaagagtatgaaagatttatcggtaagggatggcgatgcgtaggattaggtagtcggcggggtaacggcccaccgagcctacgatccttaggggttctgagaggaa

SEQ ID NO: 10364 - DNA, 301 bp, unidentified
  misc_feature 1..301: note = Ascusbbf_5588E, encodes 16S rRNA
  source 1..301: mol_type = genomic DNA
agatttgatcctggctcaggatgaacgctagctacaggcttaacacatgcaagtcgaggggcagcatgacgatagcttgctattgttgatggcgaccggcgcacgggtgcgtaacgcgtatcgaaccttccccttactcgggaatagcccggtgaaaaccgaattaatgcccgatatatatttagatggcatcagaagagtatgaaagatttatcggtaagggatggcgatgcgtaggattaggtagtcggcggggtaacggcccaccgagcctacgatccttaggggttctgagaggaag

SEQ ID NO: 10365 - DNA, 300 bp, unidentified
  misc_feature 1..300: note = Ascusbbf_5588F, encodes 16S rRNA
  source 1..300: mol_type = genomic DNA
agagtttgatcatggctcaggacggacgctagctacaggattaacacatgcaagtcgaggggcagcatgacgagtgcttgcacttgttgatggcgaccggcgcacgggtgcgtaacgcgtatcgaaccttccccttactcgggaatagcccggtgaaaaccgaattaatgcccgatatatatttagatggcatcagaagagtatgaaagatttatcggtaagggatggcgatgcgtaggattaggtagtcggcggggtaacggcccaccgagcccacgatccttaggggttctgagagga

SEQ ID NO: 10366 - DNA, 300 bp, unidentified
  misc_feature 1..300: note = Ascusbbf_5588G, encodes 16S rRNA
  source 1..300: mol_type = genomic DNA
agagtttgatcatggctcaggatgaacgctagctacaggcttaacacatgcaagtcgaggggcagcatgacgatagcttgctattgttgatggcgaccggcgcacgggtgcgtaacgcgtatcgaaccttccccttactcgggaatagcccggtgaaaaccgaattaatgcccgatatatatttagatggcatcagaagagtatgaaagatttatcggtaagggatggcgatgcgtaggattaggtagtcggcggggtaacggcccaccgagcctacgatccttaggggttctgagagga

SEQ ID NO: 10367 - DNA, 300 bp, unidentified
  misc_feature 1..300: note = Ascusbbf_5588H, encodes 16S rRNA
  source 1..300: mol_type = genomic DNA
agagtttgatcatggctcaggatgaacgctagctacaggcttaacacatgcaagtcgaggggcagcatgacgggtgcttgcacttgttgatggcgaccggcgcacgggtgcgtaacgcgtatcgaaccttccccttactcgggaatagcccggtgaaaaccgaattaatgcccgatatatatttagatggcatcagaagagtatgaaagatttatcggtaagggatggcgatgcgtaggattaggtagtcggcggggtaacggcccaccgagccgacgatccttaggggttctgagagga

SEQ ID NO: 10368 - DNA, 301 bp, unidentified
  misc_feature 1..301: note = Ascusbbf_4691A, encodes 16S rRNA
  source 1..301: mol_type = genomic DNA
agagtttgatcatggctcaggatgaacgctggcggcgtgcctaacacatgcaagtcgaacgaagcactttcctcggagattcgtcgaagagggatttgacttagtggcggacgggtgagtaatgtatgagcaacctgcctttcagagggggacaacagttggaaacgactgctaataccgcataatgtatcgagggggcatccctttgataccaaaggagcaatccgctgaaagatgggctcatatctgattagttagttggtggggtaacggctcaccaagactgcgatcagtagccggg

SEQ ID NO: 10369 - DNA, 301 bp, unidentified
  misc_feature 1..301: note = Ascusbbf_4691B, encodes 16S rRNA
  source 1..301: mol_type = genomic DNA
agagtttgatcctggctcaggatgaacgctggcggcgtgcctaacacatgcaagtcgaacgaagcactttcctcggagattcgtcgaagagggatttgacttagtggcggacgggtgagtaatgtatgagcaacctgcctttcagagggggacaacagttggaaacgactgctaataccgcataatgtatcgagggggcatccctttgataccaaaggagcaatccgctgaaagatgggctcatatctgattagttagttggtggggtaacggctcaccaagactgcgatcagtagccggg

SEQ ID NO: 10370 - DNA, 301 bp, unidentified
  misc_feature 1..301: note = Ascusbbf_4691C, encodes 16S rRNA
  source 1..301: mol_type = genomic DNA
agagtttgatcatggctcaggatgaacgctggcggcgtgcctaacacatgcaagtcgaacgaagcatcttcctcagagattcgtcgaagagggatttgacttagtggcggacgggtgagtaatgtatgagcaacctgcctttcagagggggacaacagttggaaacgactgctaataccgcataatgtatcgagggggcatccttttgataccaaaggagcaatccgctgaaagatgggctcatatctgattagttagttggtagggtaacggcctaccaagactgcgatcagtagccggg

SEQ ID NO: 10371 - DNA, 301 bp, unidentified
  misc_feature 1..301: note = Ascusbbf_9770A, encodes 16S rRNA
  source 1..301: mol_type = genomic DNA
agagtttgatcctggctcaggatgaacgctggcggcgtgcctaatacatgcaagtcgagcgaggtagcttgctacctagcggcgaacgggtgagtaacacgtaggtaacctgcctttaagactgggatacccaggcgaaagcttggctaataccggataacaacggggatcgcatgatctccgcttgaaaggtgcgtttgcaccacttttagatggacctgcggcacattagctagttggtgagataacagcccaccaaggcgaggatgtgtagccgacctgagagggtgaccggccacaa

SEQ ID NO: 10372 - DNA, 301 bp, unidentified
  misc_feature 1..301: note = Ascusbbf_9770B, encodes 16S rRNA
  source 1..301: mol_type = genomic DNA
agagtttgatcatggctcaggatgaacgctggcggcgtgcctaatacatgcaagtcgagcgaggtagcttgctacctagcggcgaacgggtgagtaacacgtaggtaacctgcctttaagactgggatacccaggcgaaagcttggctaataccggataacaacggggatcgcatgatctccgcttgaaaggtgcgtttgcaccacttttagatggacctgcggcacattagctagttggtgagataacagcccaccaaggcgaggatgtgtagccgacctgagagggtgaccggccacaa

SEQ ID NO: 10373 - DNA, 301 bp, unidentified
  misc_feature 1..301: note = Ascusbbf_9770C, encodes 16S rRNA
  source 1..301: mol_type = genomic DNA
agagtttgatcatggctcaggatgaacgctggcggcgtgcctaatacatgcaagtcgagcgaggtagcttgctacctagcggcgaacgggtgagtaacacgtaggtaacctgcctttgagactgggatacccgagggaaacttcggctaataccggataacaacggggatggcatcatctccgcttgaaaggtgcgtttgcaccactcttagatggacctgcggcacattagctagttggtgagataatagcccaccaaggcgaggatgtgtagccgacctgagagggtaaacggccacaa

SEQ ID NO: 10374 - DNA, 301 bp, unidentified
  misc_feature 1..301: note = Ascusbbf_9770D, encodes 16S rRNA
  source 1..301: mol_type = genomic DNA
agagtttgatcatggctcaggatgaacgctggcggcgtgcctaatacatgcaagtcgagcgaggtagcttgctacctagcggcgaacgggtgagtaacacgtaggtaacctgcctttgagactgggatacccgagggaaacttcggctaataccggataacaacggggatggcatcatctccgcttgaaaggtgcgtttgcaccactcttagatggacctgcggcacattagctagttggtgagataacagcccaccaaggcgaggatgtgtagccgacctgagagggtaaacggccacaa

SEQ ID NO: 10375 - DNA, 301 bp, unidentified
  misc_feature 1..301: note = Ascusbbf_9770E, encodes 16S rRNA
  source 1..301: mol_type = genomic DNA
agagtttgatcctggctcaggatgaacgctggcggcgtgcctaatacatgcaagtcgagcgaggtagcttgctacctagcggcgaacgggtgagtaacacgtaggtaacctgcctttaagactgggatacccgagggaaacttcggctaataccggataacaacggggatggcatcatctccgcttgaaaggtgcgtttgcaccacttttagatggacctgcggcacattagctagttggtgagataacagcccaccaaggcgaggatgtgtagccgacctgagagggtgaccggccacaa

SEQ ID NO: 10376 - DNA, 301 bp, unidentified
  misc_feature 1..301: note = Ascusbbf_9770F, encodes 16S rRNA
  source 1..301: mol_type = genomic DNA
agagtttgatcctggctcaggatgaacgctggcggcgtgcctaatacatgcaagtcgagcgaggtagcttgctacctagcggcgaacgggtgagtaacacgtaggtaacctgcctttgagactgggatacccgagggaaacttcggctaataccggataacaacggggatggcatcatctccgcttgaaaggtgcgtttgcaccactcttagatggacctgcggcacattagctagttggtgagataatagcccaccaaggcgaggatgtgtagccgacctgagagggtaaacggccacaa

SEQ ID NO: 10377 - DNA, 301 bp, unidentified
  misc_feature 1..301: note = Ascusbbf_9770G, encodes 16S rRNA
  source 1..301: mol_type = genomic DNA
agagtttgatcatggctcaggatgaacgctggcggcgtgcctaatacatgcaagtcgagcgaggtagcttgctacctagcggcgaacgggtgagtaacacgtaggtaacctgcctttaagactgggatacccgagggaaacttcggctaataccggataacaacggggatggcatcatctccgcttgaaaggtgcgtttgcaccacttttagatggacctgcggcacattagctagttggtgagataacagcccaccaaggcgaggatgtgtagccgacctgagagggtgaccggccacaa

SEQ ID NO: 10378 - DNA, 301 bp, unidentified
  misc_feature 1..301: note = Ascusbbf_9770H, encodes 16S rRNA
  source 1..301: mol_type = genomic DNA
agagtttgatcctggctcaggatgaacgctggcggcgtgcctaatacatgcaagtcgagcgaggtagcttgctacctagcggcgaacgggtgagtaacacgtaggtaacctgcctttgagactgggatacccgaaggaaacttcggctaataccggataacaacggggatggcatcatctccgcttgaaaggtgcgtttgcaccactcttagatggacctgcggcacattagctagttggtgagataatagcccaccaaggcgaggatgtgtagccgacctgagagggtaaacggccacaa

SEQ ID NO: 10379 - DNA, 301 bp, unidentified
  misc_feature 1..301: note = Ascusbbf_14146A, encodes 16S rRNA
  source 1..301: mol_type = genomic DNA
agagtttgatcctggctcaggatgaacgctagctacaggcttaacacatgcaagtcgaggggcagcattttagtttgcttgcaaactaaagatggcgaccggcgcacgggtgagtaacacgtatccaacctgccgataactcggggatagcctttcgaaagaaagattaatatccgatagtatattaaaaccgcatggttttactattaaagaatttcggttatcgatggggatgcgttccattagtttgttggcggggtaacggcccaccaagactacgatggataggggttctgagagg

SEQ ID NO: 10380 - DNA, 301 bp, unidentified
  misc_feature 1..301: note = Ascusbbf_14146B, encodes 16S rRNA
  source 1..301: mol_type = genomic DNA
agagtttgatcatggctcaggatgaacgctagctacaggcttaacacatgcaagtcgaggggcagcattttagtttgcttgcaaactaaagatggcgaccggcgcacgggtgagtaacacgtatccaacctgccgataactcggggatagcctttcgaaagaaagattaatatccgatagtatattaaaaccgcatggttttactattaaagaatttcggttatcgatggggatgcgttccattagtttgttggcggggtaacggcccaccaagactacgatggataggggttctgagagg

SEQ ID NO: 10381 - DNA, 301 bp, unidentified
  misc_feature 1..301: note = Ascusbbf_14146C, encodes 16S rRNA
  source 1..301: mol_type = genomic DNA
agagtttgatcctggctcagattgaacgctggcggcaggcctaacacatgcaagtcgaggggcagcattttagtttgcttgcaaactaaagatggcgaccggcgcacgggtgagtaatacgtatccaacctgccgataactcggggatagcctttcgaaagaaagattaatatccgatagtatattaaaaccgcatggttttactattaaagaatttcggttatcgatggggatgcgttccattagtttgttggcggggtaacggcccaccaagactacgatggataggggttctgagagg

SEQ ID NO: 10382 - DNA, 301 bp, unidentified
  misc_feature 1..301: note = Ascusbbf_14146D, encodes 16S rRNA
  source 1..301: mol_type = genomic DNA
agagtttgatcatggctcaggatgaacgctagctacaggcttaacacatgcaagtcgaggggcagcattttagtttgcttgcaaactaaagatggcgaccggcgcacgggtgagtaacacgtatccaacctgccgataactcggggatagcctttcgaaagaaagattaatatccgatggtatattaaaaccgcatggttttactattaaagaatttcggttatcgatggggatgcgttccattagtttgttggcggggtaacggcccaccaagactacgatggataggggttctgagagg

SEQ ID NO: 10383 - DNA, 301 bp, unidentified
  misc_feature 1..301: note = Ascusbbf_14146E, encodes 16S rRNA
  source 1..301: mol_type = genomic DNA
agagtttgatcatggctcagtttgaacgctggcggcaggcctaacacatgcaagtcgaggggcagcattttagtttgcttgcaaactaaagatggcgaccggcgcacgggtgagtaacacgtatccaacctgccgataactcggggatagcctttcgaaagaaagattaatatccgatggtatattaaaaccgcatggttttactattaaagaatttcggttatcgatggggatgcgttccattagtttgttggcggggtaacggcccaccaagactacgatggataggggttctgagagg

SEQ ID NO: 10384 - DNA, 301 bp, unidentified
  misc_feature 1..301: note = Ascusbbf_14146F, encodes 16S rRNA
  source 1..301: mol_type = genomic DNA
agagtttgatcatggctcaggatgaacgctgacagaatgctttacacatgcaagtcgaggggcagcattttagtttgcttgcaaactaaagatggcgaccggcgcacgggtgagtaacacgtatccaacctgccgataactcggggatagcctttcgaaagaaagattaatatccgatagtatattaaaaccgcatggttttactattaaagaatttcggttatcgatggggatgcgttccattagtttgttggcggggtaacggcccaccaagacaacgatggataggggttctgagagg

SEQ ID NO: 10385 - DNA, 301 bp, unidentified
  misc_feature 1..301: note = Ascusbbf_14146G, encodes 16S rRNA
  source 1..301: mol_type = genomic DNA
agagtttgatcatggctcaggatgaacgctagctataggcttaacacatgcaagtcgaggggcagcattttagtttgcttgcaaactaaagatggcgaccggcgcacgggtgagtaacacgtatccaacctgccgataactcggggatagcctttcgaaagaaagattaatatccgatggtatattaaaaccgcatggttttactattaaagaatttcggttatcgatggggatgcgttccattagtttgttggcggggtaacggcccaccaagactacgatggataggggttctgagagg

SEQ ID NO: 10386 - DNA, 300 bp, unidentified
  misc_feature 1..300: note = Ascusbbf_1103A, encodes 16S rRNA
  source 1..300: mol_type = genomic DNA
agagtttgatcatggctcaggatgaacgctggcggcgtgcttaacacatgcaagtcgaacggagtattgagaatgaagttttcggatggatttttcaatacttagtggcggacgggtgagtaacgcgtgggtaacctgcctcacacagggggataacagttggaaacgactgttaataccgcataagaccacagtaccgcatggtacaggggtaaaaactccggtggtgtgagatggacccgcgtctgattagttagttggcggggtaacggcccaccaagacgacgatcagtagccgat

SEQ ID NO: 10387 - DNA, 298 bp, unidentified
  misc_feature 1..298: note = Ascusbbf_1103B, encodes 16S rRNA
  source 1..298: mol_type = genomic DNA
agagtttgatcctggctcaggatgaacgctggcggcgtgcttaacacatgcaagtcgaacggagtactgagaatgaagttttcggatggatttttcagtacttagtggcggacgggtgagtaacgcgtgggtaacctgcctcacacagggggataacagttggaaacgactgttaataccgcataagaccacagtaccgcatggtacaggggtaaaaactccggtggtgtgagatggacccgcgtctgattagttagttggcggggtaacggcccaccaagacgacgatcagtagccg

SEQ ID NO: 10388 - DNA, 300 bp, unidentified
  misc_feature 1..300: note = Ascusbbf_1103C, encodes 16S rRNA
  source 1..300: mol_type = genomic DNA
agagtttgatcatggctcaggatgaacgctagctacaggcttaacacatgcaagtcgaggggcagcatgatcttagcttgctaagattgatggcgaccggcgcacgggtgagtaacgcgtatccaaccttccctgtactaggggatagcccggcgaaagtcggattaataccctatgttttccgaagcgagcatttaatttggaacaaaggtttaccggtataggatggggatgcgtctgattagatagtaggcggggtaacggcccacctagtcgacgatcagtaggggttctgagagg

SEQ ID NO: 10389 - DNA, 298 bp, unidentified
  misc_feature 1..298: note = Ascusbbf_1103D, encodes 16S rRNA
  source 1..298: mol_type = genomic DNA
agagtttgatcatggctcaggatgaacgctggcggcgtgcttaacacatgcaagtcgaacggagtactgagaatgaagttttcggatggatttttcaatacttagtggcggacgggtgagtaacgcgtgggtaacctgcctcacacagggggataacagttggaaacgactgttaataccgcataagaccacagtaccgcatggtacaggggtaaaaactccggtggtgtgagatggacccgcgtctgattagttagttggcggggtaacggcccaccaagacgacgatcagtagccg

SEQ ID NO: 10390 - DNA, 300 bp, unidentified
  misc_feature 1..300: note = Ascusbbf_1103E, encodes 16S rRNA
  source 1..300: mol_type = genomic DNA
agagtttgatcctggctcaggatgaacgctggcggcgtgcttaacacatgcaagtcgaacggagtattgagaatgaagttttcggatggattttttaatacttagtggcggacgggtgagtaacgcgtgggtaacctgcctcacacagggggataacagttggaaacgactgttaataccgcataagaccacagtaccgcatggtacaggggtaaaaactccggtggtgtgagatggacccgcgtctgattagttagttggcggggtaacggcccaccaagacgacgatcagtagccgat

SEQ ID NO: 10391 - DNA, 300 bp, unidentified
  misc_feature 1..300: note = Ascusbbf_1103F, encodes 16S rRNA
  source 1..300: mol_type = genomic DNA
agagtttgatcctggctcaggatgaacgctggcggcgtgcttaacacatgcaagtcgaacggagtaataagaatgaagttttcggatggattttttattacttagtggcggacgggtgagtaacgcgtgggtaacctgcctcatacagggggataacagttggaaacgactgttaataccgcataagaccacagtgccgcatggcacaggggtaaaaactccggtggtatgagatggacccgcgtctgattagttagttggcggggtaacggcccaccaagacgacgatcagtagccgat

SEQ ID NO: 10392 - DNA, 300 bp, unidentified
  misc_feature 1..300: note = Ascusbbf_1103G, encodes 16S rRNA
  source 1..300: mol_type = genomic DNA
agagtttgatcatggctcaggatgaacgctggcggcgtgcttaacacatgcaagtcgaacggagtattagagatgaagttttcggatggattttttaatacttagtggcggacgggtgagtaacgcgtgggtaacctgcctcatacagggggataacagttggaaacgactgttaataccgcataagaccacagtaccgcatggtacaggggtaaaaactccggtggtatgagatggacccgcgtctgattagttagttggcggggtaacggcccaccaagacgacgatcagtagccgat

SEQ ID NO: 10393 - DNA, 301 bp, unidentified
  misc_feature 1..301: note = Ascusbbf_1103H, encodes 16S rRNA
  source 1..301: mol_type = genomic DNA
agagtttgatcatggctcaggatgaacgctagcggcaggcttaacacatgcaagtcgaggggtaacaggggatgtagcaatacatcctgctgacgaccggcgcacgggtgcgtaacgcgtatgcaacctgcccgcaacaggggtataacggagtgaaaattccactaatcccccatattgtcattaggccgcatggctttatgacgaaaggttattctggttgcggatgggcatgcgtgacattaggtagttggcggggtaacggcccaccaagccgacgatgtctaggggagctgagagg

SEQ ID NO: 10394 - DNA, 300 bp, unidentified
  misc_feature 1..300: note = Ascusbbf_1103I, encodes 16S rRNA
  source 1..300: mol_type = genomic DNA
agagtttgatcatggctcaggatgaacgctggcggcgtgcttaacacatgcaagtcgaacggagtatcaagaatgaagttttcggatggattttttgatacttagtggcggacgggtgagtaacgcgtgggtaacctgcctcatacagggggataacagttggaaacgactgttaataccgcataagaccacagtaccgcatggtacaggggtaaaaactccggtggtatgagatggacccgcgtctgattagttagttggcggggtaacggcccaccaagacgacgatcagtagccgat

SEQ ID NO: 10395 - DNA, 300 bp, unidentified
  misc_feature 1..300: note = Ascusbbf_13717A, encodes 16S rRNA
  source 1..300: mol_type = genomic DNA
agagtttgatcatggctcaggatgaacgctagctacaggcttaacacatgcaagtcgaggggcagcatggaggttgcttgcaacttccgatggcgaccggcgcacgggtgagtaacacgtatccaaccttccccgcggtggggaacagcccgctgaaaggcggattaatgccccatggtctcctttgcaggcatctaacgaggagtaaagattgatcgccgcgggatggggatgcgcccgattaggcagcaggcggggtgacggcccacctggccatcgatcggtaggggttctgagagg

SEQ ID NO: 10396 - DNA, 298 bp, unidentified
  misc_feature 1..298: note = Ascusbbf_13717B, encodes 16S rRNA
  source 1..298: mol_type = genomic DNA
agagtttgatcatggctcaggacgaacgctggcggcgtgcctaacacatgcaagtcgaacggggattttgtttcggcagaatcctagtggcgaacgggtgagtaacgcgtaggcaacctgccctccggccggggacaacactccgaaaggggtgctaataccggatacgaagtctgtgccgcatggtacggatttgaaagatggcctctgtttacaagctatcgccgggggatgggcctgcgtccgattagctggttggtggggtaacggcctaccaaggcgacgatcggtagccggt

SEQ ID NO: 10397 - DNA, 300 bp, unidentified
  misc_feature 1..300: note = Ascusbbf_13717C, encodes 16S rRNA
  source 1..300: mol_type = genomic DNA
agagtttgatcatggctcaggatgaacgctagctacaggcttaacacatgcaagtcgaggggcagcatggaggttgcttgcaacttccgatggcgaccggcgcacgggtgagtaacacgtatccaaccttccccgcggtagggaacagcccgctgaaaggcggattaatgccctatggtctcctttgcaggcatctaatgaggagtaaagattgatcgccgcgggatggggatgcgcccgattaggcagcaggcggggtgacggcccacctggccatcgatcggtaggggttctgagagg

SEQ ID NO: 10398 - DNA, 300 bp, unidentified
  misc_feature 1..300: note = Ascusbbf_876A, encodes 16S rRNA
  source 1..300: mol_type = genomic DNA
agagtttgatcatggctcaggatgaacgctggcggcgtgcctaacacatgcaagtcgagcggagtgaagagagcttgcttttttcactcagcggcggatgggtgaggaacgcgtggggaacctgcctctcacagggggataacagctggaaacggctgttaataccgcatatgcacacagtgccgcatggcacagggtggaaagaaattcggtgagagatggacccgcgttggattagcttgttggcggggtaacggcccaccaaggcgatgatccatagccggcctgagagggcgaccg

SEQ ID NO: 10399 - DNA, 301 bp, unidentified
  misc_feature 1..301: note = Ascusbbf_876B, encodes 16S rRNA
  source 1..301: mol_type = genomic DNA
agagtttgatcatggctcaggatgaacgctggcggcgtgcctaacacatgcaagtcgagcggagtgaagagagcttgcttttttcactcagcggcggatgggtgaggaacgcgtggggaacctacctctcacagggggataacagctggaaacggctgttaataccgcatatgcacacagtgccgcatggcacagggtggaaagaaattcggtgagagatggacccgcgttggattagcttgttggcggggtaacggcccaccaaggcgatgatccatagccggcctgagagggcgaccgg

SEQ ID NO: 10400 - DNA, 301 bp, unidentified
  misc_feature 1..301: note = Ascusbbf_876C, encodes 16S rRNA
  source 1..301: mol_type = genomic DNA
agagtttgatcctggctcaggatgaacgctggcggcgtgcctaacacatgcaagtcgagcggagtgaagagagcttgcttttttcacttagcggcggatgggtgaggaacgcgtggggaacctgcctctcacagggggataacagctggaaacggctgttaataccgcatatgcacacagtgccgcatggcacagggtggaaagaaattcggtgagagatggacccgcgttggattagcttgttggcggggtaacggcccaccaaggcgatgatccatagccggcctgagagggcgaccgg

SEQ ID NO: 10401 - DNA, 301 bp, unidentified
  misc_feature 1..301: note = Ascusbbf_876D, encodes 16S rRNA
  source 1..301: mol_type = genomic DNA
agagtttgatcatggctcaggatgaacgctggcggcgtgcctaacacatgcaagtcgagcggagtgaagagagcttgcttttttcacttagcggcggatgggtgaggaacgcgtggggaacctgcctctcacagggggataacagctggaaacggctgttaataccgcatatgcacacagtgccgcatggcacagggtggaaagaaattcggtgagagatggacccgcgttggattagcttgttggcggggtaacggcccaccaaggcgatgatccatagccggcctgagagggcgaccgg

SEQ ID NO: 10402 - DNA, 225 bp, unidentified
  misc_feature 1..225: note = Ascusbbf_876E, encodes 16S rRNA
  source 1..225: mol_type = genomic DNA
agagtttgatcatggctcaggatgaacgctggcggcgtgcctaacacatgcaagtcgagcggagtgaagagagcttgcttttttcactcagcggcggatgggtgaggaacgcgtggggaacctgcctctcacagggggataacagctggaaacggctgttaataccgcatatgcacacagtgccgcatggcacagggtggaaagaaattcggtgagagatggacc

SEQ ID NO: 10403 - DNA, 301 bp, unidentified
  misc_feature 1..301: note = Ascusbbf_876F, encodes 16S rRNA
  source 1..301: mol_type = genomic DNA
agagtttgatcatggctcaggatgaacgctggcggcgtgcctaacacatgcaagtcgagcggagtgaagagagcttgcttttttcactcagcggcggatgggtgaggaacgcgtggggaacctgcctctcacagggggataacagctggaaacggctgttaataccgcatatgcacacagtgccgcatggcacagggtggaaagaaattcggtgagagatggacccgcgttggattagcttgttggcggggtaacggcccaccaaggcgatgatccatagccggcctgagagggcgaccgg

SEQ ID NO: 10404 - DNA, 300 bp, unidentified
  misc_feature 1..300: note = Ascusbbf_876G, encodes 16S rRNA
  source 1..300: mol_type = genomic DNA
agagtttgatcatggctcaggatgaacgctggcggcgtgcctaacacatgcaagtcgagcggagtgaagagagcttgcttttttcacttagcggcggatgggtgaggaacgcgtggggaacctgcctctcacagggggataacagctggaaacggctgttaataccgcatatgcacacagtgccgcatggcacagggtggaaagaaattcggtgagagatggacccgcgttggattagcttgttggcggggtaacggcccaccaaggcgatgatccatagccggcctgagagggcgaccg

SEQ ID NO: 10405 - DNA, 299 bp, unidentified
  misc_feature 1..299: note = Ascusbbf_4936A, encodes 16S rRNA
  source 1..299: mol_type = genomic DNA
agagtttgatcatggctcaggacgaacgctggcggcgtgcttaacacatgcaagtcgaacggggcgattagaagcttgcttttatgagcctagtggcaaacgggtgagtaacgcgtaggcaacctgcctctaagatggggacaacagagcgaaagttctgctaataccgaatgttgtaagtaactcgcatgagggacttaccaaagatggccgctacttgtaagctatcacttagagatgggcctgcgtctgattagctagttggtggggtaacggcccaccaaggcgacgatcagtag

SEQ ID NO: 10406 - DNA, 301 bp, unidentified
  misc_feature 1..301: note = Ascusbbf_4936B, encodes 16S rRNA
  source 1..301: mol_type = genomic DNA
agagtttgatcatggctcaggacgaacgctggcggcgtgcttaacacatgcaagtcgaacgggactgattgaaagcttgcttttgaaaagtctagtggcaaacgggtgagtaacgcgtaggcaacctgcctctaagatggggacaacagcccgaaagggctgctaataccgaatgttgtaagtaactcgcatgagagacttaccaaagatggcctctacttgtaagctatcacttagagatgggcctgcgtctgattagctagttggtgaggtaacggctcaccaaggcgacgatcagtag

SEQ ID NO: 10407 - DNA, 301 bp, unidentified
  misc_feature 1..301: note = Ascusbbf_113152A, encodes 16S rRNA
  source 1..301: mol_type = genomic DNA
agagtttgatcctggctcaggatgaacgctggcggcgtgcttaacacatgcaagtcgaacggactttacatgaaacctagtgattgtaaagttagtggcggacgggtgagtaacgcgtgaataacctgccttgtactgggggacaacagttggaaacggctgctaataccgcataagcgcacggttccgcatggaacagtgtgaaaaactccggtggtacaagatggattcgcgtctgattagccagttggcggggtaacggcccaccaaagcgacgatcagtagccggcctgagagggtg

SEQ ID NO: 10408 - DNA, 301 bp, unidentified
  misc_feature 1..301: note = Ascusbbf_9031A, encodes 16S rRNA
  source 1..301: mol_type = genomic DNA
agagtttgatcatggctcaggatgaacgctagctacaggcttaacacatgcaagtcgaggggcagcatggtcttagcttgctaagattgatggcgaccggcgcacgggtgagtaacgcgtatccaaccttccctatagtaggggatagcccgtagaaatgcggattaataccctatgttgtattttgaggacatctgacgaataccaaaggtttaccgctataggatggggatgcgtctgattaggttgttggtggggtaacggcccaccaagcctacgatcagtaggggttctgagagga

SEQ ID NO: 10409 - DNA, 300 bp, unidentified
  misc_feature 1..300: note = Ascusbbf_9031B, encodes 16S rRNA
  source 1..300: mol_type = genomic DNA
agagtttgatcatggctcaggacgaacgctggcggcgtgcttaacacatgcaagtcgagcgatgaagttccttcgggaatggattagcggcggacgggtgagtaacacgtgggtaacctgcctcatagaggggaatagcctttcgaaaggaagattaataccgcataagattgtagtgccgcatggcatagcaattaaaggagtaatccgctatgagatggacccgcgtcgcattagctagttggtgaggtaacggctcaccaaggcgacgatgcgtagccgacctgagagggtgatcgg

SEQ ID NO: 10410 - DNA, 301 bp, unidentified
  misc_feature 1..301: note = Ascusbbf_9031C, encodes 16S rRNA
  source 1..301: mol_type = genomic DNA
agagtttgatcatggctcaggatgaacgctagctacaggcttaacacatgcaagtcgaggggcagcatggtcttagcttgctaagattgatggcgaccggcgcacgggtgagtaacgcgtatccaaccttccctatagtaggggatagcccgtagaaatgcggattaataccctatgttgtattttgaggacatctgacgaataccaaaggtttaccgctataggatggggatgcgtctgattaggttgttggcggggtaacggcccaccaagcctacgatcagtaggggttctgagagga

SEQ ID NO: 10411 - DNA, 301 bp, unidentified
  misc_feature 1..301: note = Ascusbbf_9031D, encodes 16S rRNA
  source 1..301: mol_type = genomic DNA
agagtttgatcctggctcaggatgaacgctagctacaggcttaacacatgcaagtcgaggggcagcatggtcttagcttgctaagattgatggcgaccggcgcacgggtgagtaacgcgtatccaaccttccctatagtaggggatagcccgtagaaatgcggattaataccctatgttgtatttcgatgacatctgacgaataccaaaggttcaccgctataggatggggatgcgtctgattaggtagtcggcggggtaacggcccaccgagccaacgatcagtaggggttctgagagga

SEQ ID NO: 10412 - DNA, 300 bp, unidentified
  misc_feature 1..300: note = Ascusbbf_9031E, encodes 16S rRNA
  source 1..300: mol_type = genomic DNA
agagtttgatcatggctcaggatgaacgctagctacaggcttaacacatgcaagtcgaggggcagcatggtcttagcttgctaagattgatggcgaccggcgcacgggtgagtaacgcgtatccaaccttccctatagtaggggatagcccgtagaaatgcggattaataccctatgttgtatttcgatgacatctgacgaataccaaaggttcaccgctataggatggggatgcgtctgattaggtagtcggcggggtaacggcccaccgagccaacgatcagtaggggttctgagagg

SEQ ID NO: 10413 - DNA, 301 bp, unidentified
  misc_feature 1..301: note = Ascusbbf_9031F, encodes 16S rRNA
  source 1..301: mol_type = genomic DNA
agagtttgatcatggctcaggatgaacgctagctacaggcttaacacatgcaagtcgaggggcagcatggtcttagcttgctaagattgatggcgaccggcgcacgggtgagtaacgcgtatccaaccttccctatagtaggggatagcccgtagaaatgcggattaataccctatgttgtattttgaggacatctgacgaataccaaaggttcaccgctataggatggggatgcgtctgattaggtagtcggcggggtaacggcccaccgagccaacgatcagtaggggttctgagagga

SEQ ID NO: 10414 - DNA, 301 bp, unidentified
  misc_feature 1..301: note = Ascusbbf_9031G, encodes 16S rRNA
  source 1..301: mol_type = genomic DNA
agagtttgatcatggctcaggatgaacgctagctacaggcttaacacatgcaagtcgaggggcagcatggtcttagcttgctaaggccgatggcgaccggcgcacgggtgagtaacgcgtatccaaccttccctatagtaggggatagcccgtagaaatgcggattaataccctatgttgtattttgatgacatcagatgaataccaaaggtttaccgctataggatggggatgcgtctgattaggtagtcggcggggtaacggcccaccgagccatcgatcagtaggggttctgagagga

SEQ ID NO: 10415 - DNA, 300 bp, unidentified
  misc_feature 1..300: note = Ascusbbf_11823A, encodes 16S rRNA
  source 1..300: mol_type = genomic DNA
agagtttgatcctggctcagaacgaatgctggcggtgcgtcttaagcatgcaagtcgaacggcaagggtagcttgctacccctagagtggcggactggtgagtaacgcgtaggtgatgtacctttcggatggggatagccagtagaaatattggataataccgaatacgatttcatatcttagaagtatgaaatgaaaagagctatggctctgccgatagaacggcctgcgtaatatcagcttgttggtgaggtaacggcccaccaaggctatgacatttatccggcctgagagggtgat

SEQ ID NO: 10416 - DNA, 300 bp, unidentified
  misc_feature 1..300: note = Ascusbbf_11823B, encodes 16S rRNA
  source 1..300: mol_type = genomic DNA
agagtttgatcatggctcagaacgaatgctggcggtgcgtcttaagcatgcaagtcgaacggcaagggtagcttgctacccctagagtggcggactggtgagtaacgcgtaggtgatgtacctttcggatggggatagccagtagaaatattggataataccgaatacgatttcatatcttagaagtatgaaatgaaaagagctatggctctgccgatagaacggcctgcgtaatatcagcttgttggtgaggtaacggcccaccaaggctatgacatttatccggcctgagagggtgat

SEQ ID NO: 10417 - DNA, 300 bp, unidentified
  misc_feature 1..300: note = Ascusbbf_11823C, encodes 16S rRNA
  source 1..300: mol_type = genomic DNA
agagtttgatcatggctcagaacgaatgctggcggtgcgtcttaagcatgcaagtcgaacggcaagggtagcttgctacccctagagtggcggactggtgagtaacgcgtaggtgatgtacctttcggatggggatagccagtagaaatattggataataccgaatacgatttcatatcttagaagtatgaaatgaaaagagctatggctctgccgatagaacagcctgcgtaatatcagcttgttggtgaggtaacggcccaccaaggctatgacatttatccggcctgagagggtgat

SEQ ID NO: 10418 - DNA, 300 bp, unidentified
  misc_feature 1..300: note = Ascusbbf_1007A, encodes 16S rRNA
  source 1..300: mol_type = genomic DNA
agagtttgatcctggctcaggatgaacgctagcgacaggcttaacacatgcaagtcgaggggcagcgtggcggtagcaatactgccgacggcgaccggcgcactggtgagtaacacgtatgcaacctgcccctggttgggggataacccgcggaaacgcggcctaataccccgtatgcgccgaggccgcatgacttcggcgtgatagaatttcgtccagggatgggcatgcggcgcattagctagttggcggggcaacggcccaccaaggcaacgatgcgtaggggttctgagaggaagg

SEQ ID NO: 10419 - DNA, 301 bp, unidentified
  misc_feature 1..301: note = Ascusbbf_24422A, encodes 16S rRNA
  source 1..301: mol_type = genomic DNA
agagtttgatcctggctcaggatgaacgctagctacaggcttaacacatgcaagtcgaggggcagcatggggatggcttgccattcccgatggcgaccggcgcacgggtgagtaacgcgtatccaacctgcccgcaaccgcggaatagcccgccgaaaggcggattaatgccgcatgagctcgcgtgagggcatctgcccgcgagcaaaggttcgttccggttgcggatggggatgcgtccgattaggcagcaggcggggcaacggcccacctggcccgcgatcggtaggggttctgagag

SEQ ID NO: 10420 - DNA, 300 bp, unidentified
  misc_feature 1..300: note = Ascusbbf_951A, encodes 16S rRNA
  source 1..300: mol_type = genomic DNA
agagtttgatcatggctcaggatgaacgctggcggcgcgcctaacacatgcaagtcgaacggttaaagcaccttcgggtgtgtataaagtggcgaacggctgagtaacacgtgggcaacctgcccctcgcaccgggatagcctcgggaaaccgtggttaataccggatactccgggacccccgcatgggggcgccgggaaagccctgacggcgagggatgggcccgcggcctgttagcttgttggcggggtaacggcccaccaaggcgattatgggtagccgggttgagagaccgaccgg

SEQ ID NO: 10421 - DNA, 300 bp, unidentified
  misc_feature 1..300: note = Ascusbbf_951B, encodes 16S rRNA
  source 1..300: mol_type = genomic DNA
agagtttgatcctggctcaggatgaacgctggcggcgcgcctaacacatgcaagtcgaacggttaaagcaccttcgggtgtgtataaagtggcgaacggctgagtaacacgtgggcaacctgcccctcgcaccgggatagcctcgggaaaccgtggttaataccggatactccgggacccccgcatgggggtgccgggaaagccctgacggcgagggatgggcccgcggcctgttagcttgttggcggggtaacggcccaccaaggcgattatgggtagccgggttgagagaccgaccgg

SEQ ID NO: 10422 - DNA, 300 bp, unidentified
  misc_feature 1..300: note = Ascusbbf_951C, encodes 16S rRNA
  source 1..300: mol_type = genomic DNA
agagtttgatcctggctcaggatgaacgctggcggcgcgcctaacacatgcaagtcgaacggttaaagcaccttcgggtgtgtataaagtggcgaacggctgagtaacacgtgggcaacctgcccctcgcaccgggatagcctcgggaaaccgtggttaataccggatactccgggacccccgcatgggggtgccgggaaagccctgacggcgagggatgggcccgcggcctgttagcttgttggcgggggaacggcccaccaaggcgattatgggtagccgggttgagagaccgaccgg

SEQ ID NO: 10423 - DNA, 300 bp, unidentified; identical to SEQ ID NO: 10420
  misc_feature 1..300: note = Ascusbbf_951D, encodes 16S rRNA
  source 1..300: mol_type = genomic DNA

SEQ ID NO: 10424 - DNA, 300 bp, unidentified
  misc_feature 1..300: note = Ascusbbf_951E, encodes 16S rRNA
  source 1..300: mol_type = genomic DNA
agagtttgatcctggctcaggatgaacgctggcggcgcgcctaacacatgcaagtcgaacggttaaagcaccttcgggtgtgtataaagtggcgaacggctgagtaacacgtgggcaacctgcccctcgcacagggatagcctcgggaaaccgtggttaatacctgatactccgggacccccgcatgggggacccgggaaagctccgacggcgagggatgggcccgcggcctgttagcttgttggcggggtaacggcccaccaaggcaatgatgggtagccgggttgagagaccgaccgg

SEQ ID NO: 10425 - DNA, 298 bp, unidentified
  misc_feature 1..298: note = Ascusbbf_951F, encodes 16S rRNA
  source 1..298: mol_type = genomic DNA
agagtttgatcatggctcaggacgaacgctggcggcgtgcttaacacatgcaagtcgaacgagaagagatgagaagcttgcttcttattgattcgagtggcaaacgggtgagtaacgcgtaagcaacctgcccttcagatggggacaacagctggaaacggctgctaataccgaatacgttctttttgtcgcatggcagagagaagaaagggaggctcttcggagctttcgctgaaggaggggcttgcgtctgattagctagttggaggggtaacggcccaccaaggcgacgatcagt

SEQ ID NO: 10426 - DNA, 298 bp, unidentified
  misc_feature 1..298: note = Ascusbbf_951G, encodes 16S rRNA
  source 1..298: mol_type = genomic DNA
agagtttgatcatggctcaggacgaacgctggcggcgtgcttaacacatgcaagtcgaacgagaagagatgagaagcttgcttcttattaattcgagtggcaaacgggtgagtaacgcgtaagcaacctgcccttcagatggggacaacagctggaaacggctgctaataccgaatacgttctttttgtcgcatggcagagagaagaaagggaggctcttcggagctttcgctgaaggaggggcttgcgtctgattagctagttggaggggtaacggcccaccaaggcgacgatcagt

SEQ ID NO: 10427 - DNA, 300 bp, unidentified
  misc_feature 1..300: note = Ascusbbf_5699A, encodes 16S rRNA
  source 1..300: mol_type = genomic DNA
agagtttgatcctggctcagaacgaacgctggcggcgcgtcttaagcatgcaagtcgagcgggattgggtagcttgctactcatgagagcggcggactggtgagtaacgcgtgggtgacgtaccctttagacggggatagctcctagaaataggaggtaataccggatacgatagtgagtgtcagaggctcattatgaaaggttcttttgaaccgctgaaggagcggcccgcgtactattagctggttggtgaggtaacggcccaccaaggcgacgatagttatccggcctgagagggtg

SEQ ID NO: 10428 - DNA, 300 bp, unidentified
  misc_feature 1..300: note = Ascusbbf_5699B, encodes 16S rRNA
  source 1..300: mol_type = genomic DNA
agagtttgatcctggctcagaacgaacgctggcggcgcgtcttaagcatgcaagtcgagcgggattgggtagcttgctatccatgagagcggcggactggtgagtaacgcgtgggtgacgtacccttcagacggggatagctcctagaaataggaggtaataccggatacgatagtgagtgtcagaggctcattatgaaaggttcttttgaaccgctgaaggagcggcccgcgtactattagctagttggtgaggtaacggcccaccaaggcgacgatagttatccggcctgagagggtg

SEQ ID NO: 10429 - DNA, 300 bp, unidentified
  misc_feature 1..300: note = Ascusbbf_5699C, encodes 16S rRNA
  source 1..300: mol_type = genomic DNA
agagtttgatcatggctcagaacgaacgctggcggcgcgtcttaagcatgcaagtcgagcgggattgggtagcttgctactcatgagagcggcggactggtgagtaacgcgtgggtgacgtacccttcagacggggatagctcctagaaataggaggtaataccggatacgatagtgagtgtcagaggctcattatgaaaggttcttttgaaccgctgaaggagcggcccgcgtactattagctagttggtgaggtaacggcccaccaaggcgacgatagttatccggcctgagagggtg

SEQ ID NO: 10430 - DNA, 300 bp, unidentified
  misc_feature 1..300: note = Ascusbbf_5699D, encodes 16S rRNA
  source 1..300: mol_type = genomic DNA
agagtttgatcctggctcagaacgaacgctggcggcgcgtcttaagcatgcaagtcgagcgggattgggtagcttgctactcatgagagcggcggactggtgagtaacgcgtgggtgacgtacccttcagacggggatagctcctagaaataggaggtaataccggatacgatagtgagtgtcagaggctcattatgaaaggttcttttgaaccgctgaaggagcggcccgcgtactattagcttgttggtgaggtaacggcccaccaaggcgacgatagttatccggcctgagagggtg

SEQ ID NO: 10431 - DNA, 300 bp, unidentified
  misc_feature 1..300: note = Ascusbbf_130A, encodes 16S rRNA
  source 1..300: mol_type = genomic DNA
agagtttgatcctggctcaggatgaacgctagctacaggcttaacacatgcaagtcgaggggcagcatgaagtttgcttgcaaactttgatggcgaccggcgcacgggtgagtaacgcgtatccaaccttccccttactagggaatagcccggcgaaagtcggattaatgccctatgttctcctttgcgggcatctaacgaggagcaaagattcatcggtaagggatggggatgcgtctgattagccagttggcggggtaacggcccaccaaggcgacgatcagtaggggttctgagagg

SEQ ID NO: 10432 - DNA, 301 bp, unidentified
  misc_feature 1..301: note = Ascusbbf_130B, encodes 16S rRNA
  source 1..301: mol_type = genomic DNA
agagtttgatcctggctcaggatgaacgctagctacaggcttaacacatgcaagtcgaggggcagcatgaagtttgcttgcaaactttgatggcgaccggcgcacgggtgagtaacgcgtatccaaccttccccttactagggaatagcccggcgaaagtcgaattaatgccctatgttctccttcgcgggcatctaacgaggagcaaagattcatcggtaagggatggggatgcgactgattaggcagtcggcggggtaacggcccaccgagccgacgatcagtaggggttctgagagga

SEQ ID NO: 10433 - DNA, 301 bp, unidentified
  misc_feature 1..301: note = Ascusbbf_130C, encodes 16S rRNA
  source 1..301: mol_type = genomic DNA
agagtttgatcatggctcaggatgaacgctagctacaggcttaacacatgcaagtcgaggggcagcatgaagtttgcttgcaaactttgatggcgaccggcgcacgggtgagtaacgcgtatccaaccttccccttactagggaatagcccggcgaaagtcggattaatgccctatgttctccttcgcgggcatctaacgaggagcaaagattcatcggtaagggatggggatgcgtctgattaggcagtcggcggggtaacggcccaccgagccgacgatcagtaggggttctgagagga

SEQ ID NO: 10434 - DNA, 301 bp, unidentified
  misc_feature 1..301: note = Ascusbbf_130D, encodes 16S rRNA
  source 1..301: mol_type = genomic DNA
agagtttgatcctggctcaggatgaacgctagctacaggcttaacacatgcaagtcgaggggtaacgacagcgaaagcttgcttttgctgggcgacgaccggcgaatgggtgagtaacgcgtatccaacctgccgcaaagtagggcacagccttgcgaaagtaagattaatgccctatgtgctgtgatgatgacatcagaattgcagtaaaggttcaccgctttgcgatggggatgcgtctgattaggttgttggcggggtaacggcccaccaagcccgcgatcagtaggggttctgagag

SEQ ID NO: 10435 - DNA, 300 bp, unidentified
  misc_feature 1..300: note = Ascusbbf_130E, encodes 16S rRNA
  source 1..300: mol_type = genomic DNA
agagtttgatcctggctcaggatgaacgctagctacaggcttaacacatgcaagtcgaggggcagcatgaagtttgcttgcaaactttgatggcgaccggcgcacgggtgagtaacgcgtatccaaccttccccttactagggaatagcccggcgaaagtcggattaatgccctatgttctccttcgcgggcatctaacgaggagcaaagattcatcggtaagggatggggatgcgtctgattaggcagtcggcggggtaacggcccaccgagccgacgatcagtaggggttctgagagg

SEQ ID NO: 10436 - DNA, 300 bp, unidentified
  misc_feature 1..300: note = Ascusbbf_130F, encodes 16S rRNA
  source 1..300: mol_type = genomic DNA
agagtttgatcatggctcaggatgaacgctagctacaggcttaacacatgcaagtcgaggggcagcatgaagtttgcttgcaaactttgatggcgaccggcgcacgggtgagtaacgcgtatccaaccttccccttactagggaatagcccggcgaaagtcggattaatgccctatgttctcctttgcgggcatctaacgaggagcaaagattcatcggtaagggatggggatgcgtctgattagccagttggcggggtaacggcccaccaaggcgacgatcagtaggggttctgagagg

SEQ ID NO: 10437 - DNA, 301 bp, unidentified
  misc_feature 1..301: note = Ascusbbf_130G, encodes 16S rRNA
  source 1..301: mol_type = genomic DNA
agagtttgatcctggctcaggatgaacgctagctacaggcttaacacatgcaagtcgaggggcagcatgaagtttgcttgcaaactttgatggcgaccggcgcacgggtgagtaacgtgtatccaaccttccccttactagggaatagcccggcgaaagtcggattaatgccctatgttctcctttgcgggcatctaacgaggagcaaagattcatcggtaagggatggggatgcgtctgattagccagttggcggggtaacggcccaccaaggcgacgatcggtaggggttctgagagga

SEQ ID NO: 10438 - DNA, 225 bp, unidentified
  misc_feature 1..225: note = Ascusbbf_10109A, encodes 16S rRNA
  source 1..225: mol_type = genomic DNA
aagtttgctcctggctcaggacgcacgctggcggcgtgcttaacacatgcaagtcgaacggagaatttgcttcggtgaattcttagtggcgaacgggtgagtaacgcgtaggcaacctgccctctggttggggacaacattccgaaagggatgctaataccgaatgtgctcgcacctccgcatggaggtgcgaggaaagatggcctctacttgtaagctatcgcc

SEQ ID NO: 10439 - DNA, 225 bp, unidentified; identical to SEQ ID NO: 4092
  misc_feature 1..225: note = Ascusbbf_10109B, encodes 16S rRNA
  source 1..225: mol_type = genomic DNA

SEQ ID NO: 10440 - DNA, 298 bp, unidentified
  misc_feature 1..298: note = Ascusbbf_10109C, encodes 16S rRNA
  source 1..298: mol_type = genomic DNA
agagtttgatcctggctcaggacgaacgctggcggcgtgcttaacacatgcaagtcgaacggagaatttgcttcggtgaattcttagtggcgaacgggtgagtaacgcgtaggcaacctgccctctggttggggacaacattccgaaagggatgctaataccgaatgtgctcccttctccgcatggagaagggaggaaagatggcctctacttgtaagctatcgccagaagatgggcctgcgtctgattagctagtaggtggggtaacggctcacctaggcgatgatcagtagccggt

SEQ ID NO: 10441 - DNA, 297 bp, unidentified
  misc_feature 1..297: note = Ascusbbf_10109D, encodes 16S rRNA
  source 1..297: mol_type = genomic DNA
agagtttgatcctggctcaggacgaacgctggcggcgtgcttaacacatgcaagtcgaacggagaatttgcttcggtgaattcttagtggcgaacgggtgagtaacgcgtaggcaacctgccctctggttggggacaacattccgaaagggatgctaataccgaatgtgctcgcacctccgcatggaggtgcgaggaaagatggcctctacttgtaagctatcgccagaagatgggcctgcgtctgattagctagtaggtggggtaacggctcacctaggcgatgatcagtagccgg

SEQ ID NO: 10442 - DNA, 298 bp, unidentified
  misc_feature 1..298: note = Ascusbbf_10109E, encodes 16S rRNA
  source 1..298: mol_type = genomic DNA
agagtttgatcatggctcaggacgaacgctggcggcgtgcttaacacatgcaagtcgaacggagaatttgcttcggtgaattcttagtggcgaacgggtgagtaacgcgtaggcaacctgccctctggttggggacaacattccgaaagggatgctaataccgaatgtgctcgcacctccgcatggaggtgcgaggaaagatggcctctacttgtaagctatcgccagaagatgggcctgcgtctgattagctagtaggtggggtaacggctcacctaggcgatgatcagtagccggt

SEQ ID NO: 10443 - DNA, 298 bp, unidentified
  misc_feature 1..298: note = Ascusbbf_10109F, encodes 16S rRNA
  source 1..298: mol_type = genomic DNA
agagtttgatcctggctcaggacgaacgctggcggcgtgcttaacacatgcaagtcgaacggagaatttgcttcggtgaattcttagtggcgaacgggtgagtaacgcgtaggcaacctgccctctggttggggacaacattccgaaagggatgctaataccgaatgtgctcacacctccgcatggaggtgtgaggaaagatggcctctacttgtaagctatcgccagaagatgggcctgcgtctgattagctagtaggcggggtaacggctcacctaggcgatgatcagtagccggt

SEQ ID NO: 10444 - DNA, 298 bp, unidentified
  misc_feature 1..298: note = Ascusbbf_10109G, encodes 16S rRNA
  source 1..298: mol_type = genomic DNA
agagtttgatcctggctcaggacgaacgctggcggcgtgcttaacacatgcaagtcgaacggagaatttgcttcggtgaattcttagtggcgaacgggtgagtaacgcgtaggcaacctgccctctggttggggacaacattccgaaagggatgctaataccgaatgtgctcacacttccgcatggaggtgtgaggaaagatggcctctacttgtaagctatcgccagaagatgggcctgcgtctgattagctagtaggtggggtaacggctcacctaggcgatgatcagtagccggt

SEQ ID NO: 10445 - DNA, 298 bp, unidentified
  misc_feature 1..298: note = Ascusbbf_10109H, encodes 16S rRNA
  source 1..298: mol_type = genomic DNA
agagtttgatcatggctcaggacgaacgctggcggcgtgcttaacacatgcaagtcgaacggagaatttgcttcggtgaattcttagtggcgaacgggtgagtaacgcgtaggcaacctgccctctggttggggacaacattccgaaagggatgctaataccgaatgtgctcacacttccgcatggaggtgtgaggaaagatggcctctacttgtaagctatcgccagaagatgggcctgcgtctgattagctagtaggtggggtaacggctcacctaggcgatgatcagtagccggt

SEQ ID NO: 10446 - DNA, 297 bp, unidentified
  misc_feature 1..297: note = Ascusbbf_10109I, encodes 16S rRNA
  source 1..297: mol_type = genomic DNA
aagtttgatcatggctcaggacgaacgctggcggcgtgcttaacacatgcaagtcgaacggagaatttgcttcggtgaattcttagtggcgaacgggtgagtaacgcgtaggcaacctgccctctggttggggacaacattccgaaagggatgctaataccgaatgtgctcgcacctccgcatggaggtgcgaggaaagatggcctctacttgtaagctatcgccagaagatgggcctgcgtctgattagctagtaggtggggtaacggctcacctaggcgatgatcagtagccggt

SEQ ID NO: 10447 - DNA, 300 bp, unidentified
  misc_feature 1..300: note = Ascusbbf_29797A, encodes 16S rRNA
  source 1..300: mol_type = genomic DNA
agagtttgatcatggctcaggatgaacgctagcgacaggcttaacacatgcaagtcgaggggcagcatgggaggtggcaacaccacccgatggcgaccggcgcactggtgagtaacacgtatgcaacctgccccctacaggggaataacccagagaaatttggcctaataccccgtagtcagcgagagggcatcctcctgctgggaaagctccggcggtaggggatgggcatgcggcgcattagcttgttggcggggcgacggcccaccaaggcgacgatgcgtaggggttctgagagga

SEQ ID NO: 10448 - DNA, 225 bp, unidentified
  misc_feature 1..225: note = Ascusbbf_54068A, encodes 16S rRNA
  source 1..225: mol_type = genomic DNA
agagtttgatcatggctcaggatgaacgctggcggcgtgcctaacacatgcaagtcgaacggagtttttattgatttcttcggattgatatagaaacttagtggcggacgggtgagtaacacgtgggtaacctgccttacagagggggatagcagctggaaacggctgataataccgcataagcacacagtaccgcatggtacagggtgaaaagatttatcactg

SEQ ID NO: 10449 - DNA, 300 bp, unidentified; identical to SEQ ID NO: 10421
  misc_feature 1..300: note = Ascusbbf_54068B, encodes 16S rRNA
  source 1..300: mol_type = genomic DNA

SEQ ID NO: 10450 - DNA, 296 bp, unidentified
  misc_feature 1..296: note = Ascusbbf_54068C, encodes 16S rRNA
  source 1..296: mol_type = genomic DNA
agagtttgatcatggctcaggatgaacgctggcggcgtgcctaacacatgcaagtcgaacggagtttttattgatttcttcggattgatatagaaacttagtggcggacgggtgagtaacacgtgggtaacctgccttacagagggggatagcagctggaaacggctgataataccgcataagcacacagtaccgcatggtacagggtgaaaagatttatcactgtaagatggacccgcgtctgattagccagttggcagggtaacggcctaccaaagcgacgatcagtagccgac

SEQ ID NO: 10451 - DNA, 301 bp, unidentified
  misc_feature 1..301: note = Ascusbbf_54068D, encodes 16S rRNA
  source 1..301: mol_type = genomic DNA
agagtttgatcctggctcaggatgaacgctggcggcgtgcctaacacatgcaagtcgaacggagtttttattgatttcttcggattgatatagaaacttagtggcggacgggtgagtaacacgtgggtaacctgccttacagagggggatagcagctggaaacggctgataataccgcataagcacacagtaccgcatggtacagggtgaaaagatttatcactgtaagatggacccgcgtctgattagccagttggcagggtaacggcctaccaaagcgacgatcagtagccgacctgag

SEQ ID NO: 10452 - DNA, 225 bp, unidentified
  misc_feature 1..225: note = Ascusbbf_7003A, encodes 16S rRNA
  source 1..225: mol_type = genomic DNA
agagtttgatcatggctcaggatgaacgctggcggcgtgcctaacacatgcaagtcgaacgaggtaaatgagatgaagttttcggatggattcttatttaccgagtggcggacgggtgagtaacgcgtgggtaacctgcctcatacagggggataacgattggaaacgattgctaataccgcataagcgcacagtaccacatggtacagtgtgaaaaactccggt

SEQ ID NO: 10453 - DNA, 298 bp, unidentified; identical to SEQ ID NO: 10425
  misc_feature 1..298: note = Ascusbbf_7003C, encodes 16S rRNA
  source 1..298: mol_type = genomic DNA

SEQ ID NO: 10454 - DNA, 301 bp, unidentified
  misc_feature 1..301: note = Ascusbbf_23A, encodes 16S rRNA
  source 1..301: mol_type = genomic DNA
agagtttgatcctggctcaggatgaacgctggcggcgtgcttaacacatgcaagtcgaacggagaatcgcccttcgggacggttcttagtggcggacgggtgagtaacgcgtgaggaacctgccttggagtggggaataacggctggaaacggccgctaataccgcataatgcagttgggtcgcatggctctgactgccaaagatttattgctctgagatggcctcgcgtctgattagctggttggtgaggtaacggctcaccaaggcgacgatcagtagccggactgagaggttggccgg

SEQ ID NO: 10455 - DNA, 300 bp, unidentified
  misc_feature 1..300: note = Ascusbbf_1697A, encodes 16S rRNA
  source 1..300: mol_type = genomic DNA
agagtttgatcatggctcaggatgaacgctagctacaggcttaacacatgcaagtcgaggggcagcgggaagttagcttgctaactttgccggcgaccggcgcacgggtgagtaacgcgtatccaaccttccccttagtagggcatagcccgatgaaaatcggattaataccctatgttttccaatgaggacatctgagctggaacaaagattcatcgctaagggatggggatgcgtccgattaggtagtcggcggggtaacggcccaccgagccatcgatcggtaggggttctgagagg

SEQ ID NO: 10456 - DNA, 300 bp, unidentified
  misc_feature 1..300: note = Ascusbbf_1697B, encodes 16S rRNA
  source 1..300: mol_type = genomic DNA
agagtttgatcatggctcaggatgaacgctagctacaggcttaacacatgcaagtcgaggggcagcgggaagttagcttgctaactttgccggcgaccggcgcacgggtgagtaacgcgtatccaaccttccccttagtagggcatagcccgatgaaaatcggattaataccctatgttttccaatgaggacatctgagctggaacaaagattcatcgctaagggatggggatgcgtccgattaggtagtcggcggggtaacggcccaccgagcccgcgatcggtaggggttctgagagg

SEQ ID NO: 10457 - DNA, 301 bp, unidentified
  misc_feature 1..301: note = Ascusbbf_1697C, encodes 16S rRNA
  source 1..301: mol_type = genomic DNA
agagtttgatcatggctcaggatgaacgctagctacaggcttaacacatgcaagtcgaggggcagcaggatcttagcttgctaagattgctggcgaccggcgcacgggtgagtaacgcgtatccaaccttccccttagtagggcatagcccgatgaaaatcggattaataccctatgttttccaatgaggacatctgagctggaacaaagattcatcgctaagggatggggatgcgtccgattaggtagtcggcggggtaacggcccaccgagccatcgatcggtaggggttctgagagga

SEQ ID NO: 10458 - DNA, 300 bp, unidentified
  misc_feature 1..300: note = Ascusbbf_7586A, encodes 16S rRNA
  source 1..300: mol_type = genomic DNA
agagtttgatcatggctcaggatgaacgctagctacaggcttaacacatgcaagtcgaggggcagcatgaggtttgcttgcaaaccttgatggcgaccggcgcacgggtgcgcaacgcgtatccaaccttccagctactagggaatagcccgttgaaagacggattaatgccctatgtgttcattagatggcatcagatgttgaacaaagattcatcggtagctgatggggatgcgtatgattagctagtcggcggggcaacggcccaccgaggctacgatcattaggggttctgagagg

SEQ ID NO: 10459 - DNA, 300 bp, unidentified
  misc_feature 1..300: note = Ascusbbf_7586B, encodes 16S rRNA
  source 1..300: mol_type = genomic DNA
agagtttgatcatggctcaggatgaacgctagctacaggcttaacacatgcaagtcgaggggcagcatgaggtttgcttgcaaaccttgatggcgaccggcgcacgggtgcgtaacgcgtatccaaccttccagctactagggaatagcccgttgaaagacggattaatgccctatgtgttcattagatggcatcagatgttgaacaaagattcatcggtagctgatggggatgcgtatgattagctagtcggcggggtaacggcccaccgaggctacgatcattaggggttctgagagg

SEQ ID NO: 10460 - DNA, 300 bp, unidentified
  misc_feature 1..300: note = Ascusbbf_7586C, encodes 16S rRNA
  source 1..300: mol_type = genomic DNA
agagtttgatcctggctcaggatgaacgctagctacaggcttaacacatgcaagtcgaggggcagcatgaggtttgcttgcaaaccttgatggcgaccggcgcacgggtgcgtaacgcgtatccaaccttccagctactagggaatagcccgttgaaagacggattaatgccctatgtgttcattagatggcatcagatgttgaacaaagattcatcggtagctgatggggatgcgtatgattagctagtcggcggggtaacggcccaccgaggctacgatcattaggggttctgagagg

SEQ ID NO: 10461 - DNA, 300 bp, unidentified; identical to SEQ ID NO: 10459
  misc_feature 1..300: note = Ascusbbf_7586D, encodes 16S rRNA
  source 1..300: mol_type = genomic DNA

SEQ ID NO: 10462 - DNA, 301 bp, unidentified
  misc_feature 1..301: note = Ascusbbf_1034A, encodes 16S rRNA
  source 1..301: mol_type = genomic DNA
agagtttgatcatggctcaggatgaacgctggcggcgtgcctaacacatgcaagtcgaacgaagcacttctggtttgagattcgtcaagaaccgggattgacttagtggcggacgggtgagtaatgtatgagcaacctgcctttcagagggggacaacagttggaaacgactgctaataccgcataatgtatttgggtggcatcacctggataccaaaggagcaatccgctgaaagatgggctcatatctgattagttagttggcagggtaacggcctaccaagactgcgatcagtagccg

SEQ ID NO: 10463 - DNA, 301 bp, unidentified
  misc_feature 1..301: note = Ascusbbf_1034B, encodes 16S rRNA
  source 1..301: mol_type = genomic DNA
agagtttgatcctggctcaggatgaacgctggcggcgtgcctaacacatgcaagtcgaacgaagcacttctggtttgagattcgtcaagaaccgggattgacttagtggcggacgggtgagtaatgtatgagcaacctgcctttcagagggggacaacagttggaaacgactgctaataccgcataatgtatttgggtggcatcacctggataccaaaggagcaatccgctgaaagatgggctcatatctgattagttagttggcagggtaacggcctaccaagactgcgatcagtagccg

SEQ ID NO: 10464 - DNA, 300 bp, unidentified
  misc_feature 1..300: note = Ascusbbf_23134A, encodes 16S rRNA
  source 1..300: mol_type = genomic DNA
agagtttgatcatggctcaggatgaacgctagcggcaggcttaacacatgcaagtcgaggggcatcgcggtgtagcaatacactggcggcgaccggcggaagggtgcgtaacgcgtgagcaacatgcccgtggcagggggataatcgatggaaacgtcgtctaagaccccgtaacaagtgggatcgcatgatcctgttttgaaagcttcggcggccacggattggctcgcgtcccattaggtagtcggcggggtaacggcccaccgagccgacgatgggtaggggttctgagaggaaggt

SEQ ID NO: 10465 - DNA, 300 bp, unidentified
  misc_feature 1..300: note = Ascusbbf_43679A, encodes 16S rRNA
  source 1..300: mol_type = genomic DNA
agagtttgatcctggctcaggatgaacgctagcggcaggcttaacacatgcaagtcgaggggcagcgcggtgtagcaatacactggcggcgaccggcgcaagggtgcgtaacgcgtgagcgacatacccgtgactggggcataaccgatggaaacgtcgcctaattccccataatacaagggaccgcatgattccttgttgaaaacttcggtggtcacggattggctcgcgtcccattagctagtcggcggggtaacggcccaccgaggcgacgatgggtaggggttctgagaggaaggt

SEQ ID NO: 10466 - DNA, 300 bp, unidentified
  misc_feature 1..300: note = Ascusbbf_43679B, encodes 16S rRNA
  source 1..300: mol_type = genomic DNA
agagtttgatcatggctcaggatgaacgctagctacaggcttaacacatgcaagtcgaggggcagcgcggtgtagcaatacactggcggcgaccggcgcaagggtgcgtaacgcgtgagcgacatacccgtgactggggcataaccgatggaaacgtcgcctaattccccataatacaagggaccgcatggttccttgttgaaaacttcggtggtcacggattggctcgcgtcccattagctagtcggcggggtaacggcccaccgaggcgacgatgggtaggggttctgagaggaaggt

SEQ ID NO: 10467 - DNA, 299 bp, unidentified
  misc_feature 1..299: note = Ascusbbf_43679C, encodes 16S rRNA
  source 1..299: mol_type = genomic DNA
agagtttgatcctggctcaggatgaacgctagcggcaggcttaacacatgcaagtcgaggggcagcgcggggtagcaataccctggcggcgaccggcgcaagggtgcgtaacgcgtgagcgacatacccgtgactggggcataaccgatggaaacgtcgcctaattccccataatacaagggaccgcatggttccttgttgaaaacttcggtggtcacggattggctcgcgtcccattagctagtcggcggggtaacggcccaccgaggcgacgatgggtaggggttctgagaggaagg

SEQ ID NO: 10468 - DNA, 300 bp, unidentified
  misc_feature 1..300: note = Ascusbbf_43679D, encodes 16S rRNA
  source 1..300: mol_type = genomic DNA
agagtttgatcctggctcaggatgaacgctagcggcaggcttaacacatgcaagtcgaggggcagcgcggtgtagcaatacactggcggcgaccggcgcaagggtgcgtaacgcgtgagcgacatacccgtgactggggcataaccgatggaaacgtcgcctaattccccataatacaagggaccgcatgattccttgttgaaaacttcggtggtcacggattggctcgcgtcccattagctagtcggcggggtaacggcccaccgaggcgacgatgggtagggggtctgagaggaaggt

SEQ ID NO: 10469 - DNA, 300 bp, unidentified
  misc_feature 1..300: note = Ascusbbf_43679E, encodes 16S rRNA
  source 1..300: mol_type = genomic DNA
agagtttgatcatggctcaggatgaacgctagcggcaggcttaacacatgcaagtcgaggggcagcgcggtgtagcaatacactggcggcgaccggcgcaagggtgcgtaacgcgtgagcgacatacccgtgactggggcataaccgatggaaacgtcgcctaattccccataatacaagggaccgcatgattccttgttgaaaacttcggtggtcacggattggctcgcgtcccattagctagtcggcggggtaacggcccaccgaggcgacgatgggtaggggttctgagaggaaggt

SEQ ID NO: 10470 - DNA, 300 bp, unidentified
  misc_feature 1..300: note = Ascusbbf_43679F, encodes 16S rRNA
  source 1..300: mol_type = genomic DNA
agagtttgatcatggctcaggatgaacgctagcggcaggcttaacacatgcaagtcgaggggcagcgcggggtagcaatatcctggcggcgaccggcgcaagggtgcgtaacgcgtgagcgacatacccgtgactggggcataaccgatggaaacgtcgcctaattccccataacacaagggtccgcatggtcctttgttgaaaacttcggtggtcacggattggctcgcgtcccattagctagtcggcggggtaacggcccaccgaggcgacgatgggtaggggttctgagaggaaggt

SEQ ID NO: 10471 - DNA, 301 bp, unidentified
  misc_feature 1..301: note = Ascusbbf_63954A, encodes 16S rRNA
  source 1..301: mol_type = genomic DNA
agagtttgatcatggctcaggatgaacgctagcggtaggcttaacacatgcaagtcgaggggcagcgtatcgagtagcaatacttgatgacggcgaccggcggatgggtgagtaacgcgtatgcaacctaccttgtacagggggatagacactggaaacggtgcgtaatatcccgtaatgttgtggagaggcatcttttcacaaagaaaggagtgatctggtataagatgggcatgcgtaggattagctagatggtgaggtaacggctcaccatggctacgatctttaggggttctgagag

SEQ ID NO: 10472 - DNA, 298 bp, unidentified
  misc_feature 1..298: note = Ascusbbf_1517A, encodes 16S rRNA
  source 1..298: mol_type = genomic DNA
agagtttgatcatggctcaggacgaacgctggcggcgtgcctaacacatgcaagtcgaacggggattttgtttcggcagaatcctagtggcgaacgggtgagtaacgcgtaggcaacctgccctccggccggggacaacactccgaaaggggtgctaataccggatacgaagtctgtgccgcatggtacggatttgaaagatggcctctatttataagctatcgccgggggatgggcctgcgtccgattagctggttggtggggtaacggcctaccaaggcgacgatcggtagccggt

SEQ ID NO: 10473 - DNA, 298 bp, unidentified
  misc_feature 1..298: note = Ascusbbf_1517B, encodes 16S rRNA
  source 1..298: mol_type = genomic DNA
agagtttgatcctggctcaggacgaacgctggcggcgtgcctaacacatgcaagtcgaacggggattttgtttcggcagaatcctagtggcgaacgggtgagtaacgcgtaggcaacctgccctccggccggggacaacactccgaaaggggtgctaataccggatacgaagtctgtgccgcatggtacggatttgaaagatggcctctatttataagctatcgccgggggatgggcctgcgtccgattagctggttggtggggtaacggcctaccaaggcgacgatcggtagccggt

SEQ ID NO: 10474 - DNA, 298 bp, unidentified; identical to SEQ ID NO: 10396
  misc_feature 1..298: note = Ascusbbf_1517C, encodes 16S rRNA
  source 1..298: mol_type = genomic DNA

SEQ ID NO: 10475 - DNA, 298 bp, unidentified
  misc_feature 1..298: note = Ascusbbf_1517D, encodes 16S rRNA
  source 1..298: mol_type = genomic DNA
agagtttgatcctggctcaggacgaacgctggcggcgtgcctaacacatgcaagtcgaacggggattttgtttcggcagaatcctagtggcgaacgggtgagtaacgcgtaggcaacctgccctccggccggggacaacactccgaaaggggtgctaataccggatacgaagtctgtgccgcatggtacggatttgaaagatggcctctgtttacaagctatcgccgggggatgggcctgcgtccgattagctggttggtggggtaacggcctaccaaggcgacgatcggtagccggt

SEQ ID NO: 10476 - DNA, 298 bp, unidentified
  misc_feature 1..298: note = Ascusbbf_1517E, encodes 16S rRNA
  source 1..298: mol_type = genomic DNA
agagtttgatcatggctcaggatgaacgctggcggcgtgcctaacacatgcaagtcgaacggggattttgtttcggcagaatcctagtggcgaacgggtgagtaacgcgtaggcaacctgccctccggccggggacaacactccgaaaggggtgctaataccggatacgaagtctgtgccgcatggtacggatttgaaagatggcctctatttataagctatcgccgggggatgggcctgcgtccgattagctggttggtggggtaacggcccaccaagcctacgatcagtaggggtt

SEQ ID NO: 10477 - DNA, 298 bp, unidentified
  misc_feature 1..298: note = Ascusbbf_1517F, encodes 16S rRNA
  source 1..298: mol_type = genomic DNA
agagtttgatcatggctcaggacgaacgctggcggcgtgcctaacacatgcaagtcgaacggggattttgtttcggcagaaccctagtggcgaacgggtgagtaacgcataggcaacctgccctccggccggggacaacactccgaaaggggtgctaataccggatacgaagtctgtgccgcatggtacggatttgaaagatggcctctatttataagctatcgccgggggatgggcctgcgtcggattagctggttggtggggtaacggcctaccaaggcgacgatcggtagccagt

SEQ ID NO: 10478 - DNA, 298 bp, unidentified
  misc_feature 1..298: note = Ascusbbf_1517G, encodes 16S rRNA
  source 1..298: mol_type = genomic DNA
agagtttgatcctggctcaggacgaacgctggcggcgtgcctaacacatgcaagtcgaacggggattttgtttcggcagaatcctagtggcgaacgggtgagtaacgcgtaggcaacctgccctccggccggggacaacactccgaaaggggtgctaataccggatacgaagtctgtgccgcatggtacggatttgaaagatggcctctatttataagctatcgccgggggatgggcctgcgtccgattagccggttggtggggtaacggcccaccaagccgacgatcggtaggggtt

SEQ ID NO: 10479 - DNA, 297 bp, unidentified
  misc_feature 1..297: note = Ascusbbf_1517H, encodes 16S rRNA
  source 1..297: mol_type = genomic DNA
agagtttgatcatggctcaggacgaacgctggcggcgtgcctaacacatgcaagtcgaacggggattttgttttggcagaatcctagtggcgaacgggtgagtaacgcgtaggcaacctgccctccggccggggacaacactccgaaaggggtgctaataccggatacgaagtctgtgccgcatggtacggatttgaaagatggcctctatttataagctatcgccgggggatgggcctgcgtccgattagctggttggtggggtaacggcctaccaaggcgacgatgcatagccga

SEQ ID NO: 10480 - DNA, 298 bp, unidentified
  misc_feature 1..298: note = Ascusbbf_1517I, encodes 16S rRNA
  source 1..298: mol_type = genomic DNA
agagtttgatcctggctcaggataaacgccggcggcgtgcctaacacatgcaagtcgaacggggattttgtttcggcagaatcctagtggcgaacgggtgagtaacgcgtaggcaacctgccctccggccggggacaacactccgaaaggggtgctaataccggatacgaagtctgtgccgcatggtacggatttgaaagatggcctctgtttacaagctatcgccgggggatgggcctgcgtccgattagctggttggtggggtaacggcctaccaaggcgacgatcggtagccggt

SEQ ID NO: 10481 - DNA, 225 bp, unidentified
  misc_feature 1..225: note = Ascusbbf_104A, encodes 16S rRNA
  source 1..225: mol_type = genomic DNA
agagtttgatcatggctcaggataaacgctggcggcgtgcctaatacatgcaagtcgaacgaggaagacccagcttgctgggttgaccgagtggcgaacgggtgagtaatacataagcaacctgcccacggagaccgggataatctctggaaacggggactaaaaccggataggcagcaatgaggcatctcaatgctgttaaaggtgagagacactggtggatgg

SEQ ID NO: 10482 - DNA, 301 bp, unidentified
  misc_feature 1..301: note = Ascusbbf_104B, encodes 16S rRNA
  source 1..301: mol_type = genomic DNA
agagtttgatcctggctcaggataaacgctggcggcgtgcctaatacatgcaagtcgaacgagggagacccagcttgctgggttgaccgagtggcgaacgggtgagtaatacataagcaacctgcccacggagaccgggataatctctggaaacggggactaaaaccggataggcagcaatgaggcatctcaatgctgttaaaggtgagagacactggtggatgggcttatggcgcattagttagttggtgaggtaagggcccaccaagacgatgatgcgtagccggcctgagagggtgaa

SEQ ID NO: 10483 - DNA, 301 bp, unidentified
  misc_feature 1..301: note = Ascusbbf_104C, encodes 16S rRNA
  source 1..301: mol_type = genomic DNA
agagtttgatcctggctcaggataaacgctggcggcgtgcctaatacatgcaagtcgaacgagggagacccagcttgctgggttgaccgagtggcgaacgggtgagtaatacataagcaacctgcccacggagaccgggataatctctggaaacggggactaaaaccggataggcagcaatgaggcatctcaatgctgttaaaggtgagagacactggtggatgggcttatggcgcattagttagttggtgaggtaacggcccaccaagacgatgatgcgtagccggcctgagagggtgaa

SEQ ID NO: 10484 - DNA, 300 bp, unidentified
  misc_feature 1..300: note = Ascusbbf_104D, encodes 16S rRNA
  source 1..300: mol_type = genomic DNA
agagtttgatcatggctcgggataaacgctggcggcgtgcctaatacatgcaagtcgaacgagggagacccagcttgctgggttgaccgagtggcgaacgggtgagtaatacataagcaacctgcccacagagaccgggataatctctggaaacggggactaaaaccggataggcagcaatgaggcatctcaatgctgttaaaggtgagagacactggtggatgggcttatggcgcattagttagttggtgaggtaacggcccaccaagacgatgatgcgtagccggcctgagagggtga

SEQ ID NO: 10485 - DNA, 300 bp, unidentified
  misc_feature 1..300: note = Ascusbbf_104E, encodes 16S rRNA
  source 1..300: mol_type = genomic DNA
agagtttgatcctggctcaggataaacgctggcggcgtgcctaatacatgcaagtcgaacgaggaagacccagcttgctgggttgaccgagtggcgaacgggtgagtaatacataagcaacctgcccacggagaccgggataatctctggaaacggggactaaaaccggataggcagcaatgaggcatctcaatgctgttaaaggtgagagacactggtggatgggcttatggcgcattagttagttggtgaggtaagggcccaccaagacgatgatgcgtagccggcctgagagggtga

SEQ ID NO: 10486 - DNA, 300 bp, unidentified
  misc_feature 1..300: note = Ascusbbf_104F, encodes 16S rRNA
  source 1..300: mol_type = genomic DNA
agagtttgatcatggctcaggataaacgctggcggcgtgcctaatacatgcaagtcgaacgaggaagacccagcttgctgggttgaccgagtggcgaacgggtgagtaatacataagcaacctgcccacggagaccgggataatctctggaaacggggactaaaaccggataggcagcaatgaggcatctcaatgctgttaaaggtgagagacactggtggatgggcttatggcgcattagttagttggtgaggtaacggcccaccaaggcgacgatcagtagccggtctgagaggatga

SEQ ID NO: 10487 - DNA, 301 bp, unidentified
  misc_feature 1..301: note = Ascusbbf_104G, encodes 16S rRNA
  source 1..301: mol_type = genomic DNA
agagtttgatcatggctcaggataaacgctggcggcgtgcctaatacatgcaagtcgaacgagggagacccagcttgctgggttgaccgagtggcgaacgggtgagtaatacataagcaacctgcccacggagaccgggataatctctggaaacggggactaaaaccggataggcagcaatgaggcatctcaatgctgttaaaggtgagagacactggtggatgggcttatggcgcattagttagttggtgaggtaacggcccaccaagacgatgatgcgtagccggcctgagagggtgaa

SEQ ID NO: 10488 - DNA, 300 bp, unidentified
  misc_feature 1..300: note = Ascusbbf_104H, encodes 16S rRNA
  source 1..300: mol_type = genomic DNA
agagtttgatcatggctcaggataaacgctggcggcgtgcctaatacatgcaagtcgaacgagggagacccagcttgctgggttgaccgagtggcgaacgggtgagtaatacataagcaacctgcccacagagaccgggataatctctggaaacggggactaaaaccggataggcagcaatgaggcatctcaatgctgttaaaggtgagagacactggtggatgggcttatggcgcattagttagttggtgaggtaacggcccaccaagacgatgatgcgtagccggcctgagagggtga

SEQ ID NO: 10489 - DNA, 300 bp, unidentified
  misc_feature 1..300: note = Ascusbbf_104I, encodes 16S rRNA
  source 1..300: mol_type = genomic DNA
agagtttgatcatggctcaggataaacgctggcggcgtgcctaatacatgcaagtcgaacgaggaagacccagcttgctgggttgaccgagtggcgaacgggtgagtaatacataagcaacctgcccacggagaccgggataatctctggaaacggggactaaaaccggataggcagcaatgaggcatctcaatgctgttaaaggtgagagacactggtggatgggcttatggcgcattagctagttggtgaggtaacggcccaccaaggcgacgatcagtagccggactgagaggttga

SEQ ID NO: 10490 - DNA, 301 bp, unidentified
  misc_feature 1..301: note = Ascusbbf_148A, encodes 16S rRNA
  source 1..301: mol_type = genomic DNA
agagtttgatcctggctcaggatgaacgctggcggcgtgcctaacacatgcaagtcgaacgagcgagagatgaaacctagtgattctcgagcgagtggcggacgggtgagtaacgcgtgggtaacctgccttacagagggggataacagtttgaaaagactgctaataccgcataagcacacagtaccgcatggtacagggtgaaaagatttatcactgtaagatggacccgcgtctgattagccagttggcagggtaacggcctaccaaagcgacgatcagtagccgacctgagagggtg

SEQ ID NO: 10491 - DNA, 301 bp, unidentified
  misc_feature 1..301: note = Ascusbbf_148B, encodes 16S rRNA
  source 1..301: mol_type = genomic DNA
agagtttgatcctggctcaggatgaacgctggcggcgtgcctaacacatgcaagtcgaacgagcgagagatgaaacctagtgattctcaagcgagtggcggacgggtgagtaacgcgtgggtaacctgccttacagagggggataacagtctgaaaagactgctaataccgcataagcacacagtaccgcatggtacagggtgaaaagatttatcactgtaagatggacccgcgtctgattagccagttggcagggtaacggcctaccaaagcgacgatcagtagccgacctgagagggtg

SEQ ID NO: 10492 - DNA, 301 bp, unidentified
  misc_feature 1..301: note = Ascusbbf_148C, encodes 16S rRNA
  source 1..301: mol_type = genomic DNA
agagtttgatcatggctcaggatgaacgctggcggcgtgcctaacacatgcaagtcgaacgagcgagagatgaaacctagtgattctcaagcgagtggcggacgggtgagtaacgcgtgggtaacctgccttacagagggggataacagtctgaaaagactgctaataccgcataagcacacagtaccgcatggtacagggtgaaaagatttatcactgtaagatggacccgcgtctgattagccagttggcagggtaacggcctaccaaagcgacgatcagtagccgacctgagagggtg

SEQ ID NO: 10493 - DNA, 301 bp, unidentified
  misc_feature 1..301: note = Ascusbbf_148D, encodes 16S rRNA
  source 1..301: mol_type = genomic DNA
agagtttgatcctggctcaggatgaacgctggcggcgtgcctaacacatgcaagtcgaacgagcgagagatgaaacctagtgaatctcgagcgagtggcggacgggtgagtaacgcgtgggtaacctgccttacagagggggataacagtttgaaaagactgctaataccgcataagcacacagtaccgcatggtacagggtgaaaagatttatcactgtaagatggacccgcgtctgattagccagttggcagggtaacggcctaccaaagcgacgatcagtagccgacctgagagggtg

SEQ ID NO: 10494 - DNA, 301 bp, unidentified
  misc_feature 1..301: note = Ascusbbf_148E, encodes 16S rRNA
  source 1..301: mol_type = genomic DNA
agagtttgatcatggctcaggatgaacgctggcggcgtgcctaacacatgcaagtcgaacgagcgaggtatgaaacctagtgattaccgagcgagtggcggacgggtgagtaacgcgtgggtaacctgccttacagagggggataacagtttgaaaagactgctaataccgcataagcacacagtaccgcatggtacagggtgaaaagatttatcactgtaagatggacccgcgtctgattagccagttggcagggtaacggcctaccaaagcgacgatcagtagccgacctgagagggtg

SEQ ID NO: 10495 - DNA, 300 bp, unidentified
  misc_feature 1..300: note = Ascusbbf_148F, encodes 16S rRNA
  source 1..300: mol_type = genomic DNA
agagtttgatcctggctcagattgaacgctggcggcaggcttaatacatgcaagtcgaacggtaacagcaggaagcttgcttcctggctgacgagtggcggacgggtgagtaatacctggggagctgcctgaatgagggggacaacacctggaaacgggtgctaataccgcgtaagccctgagggggaaaggctgggcaaccagtcgcattcagatgcgcccaggtgggattagctagttggtggggtaacggcctaccaaggcgacgatctctagctggtctgagaggatgatcagcca

SEQ ID NO: 10496 - DNA, 301 bp, unidentified
  misc_feature 1..301: note = Ascusbbf_148G, encodes 16S rRNA
  source 1..301: mol_type = genomic DNA
agagtttgatcatggctcaggatgaacgctggcggcgtgcctaacacatgcaagtcgaacgagcgagagatgaaacctagtgaatttcgagcgagtggcggacgggtgagtaacgcgtgggtaacctgccttacagagggggataacagtttgaaaagactgctaataccgcataagcacacagtaccgcatggtacagggtgaaaagatttatcactgtaagatggacccgcgtctgattagccagttggcagggtaacggcctaccaaagcgacgatcagtagccgacctgagagggtg

SEQ ID NO: 10497 - DNA, 301 bp, unidentified
  misc_feature 1..301: note = Ascusbbf_148H, encodes 16S rRNA
  source 1..301: mol_type = genomic DNA
agagtttgatcatggctcaggatgaacgctggcggcgtgcctaacacatgcaagtcgaacgagcgagagatgaaacctagtgattcttgagcgagtggcggacgggtgagtaacgcgtgggtaacctgccttacagagggggataacagtttgaaaagactgctaataccgcataagcacacagtaccgcatggtacagggtgaaaagatttatcactgtaagatggacccgcgtctgattagccagttggcagggtaacggcctaccaaagcgacgatcagtagccgacctgagagggtg

SEQ ID NO: 10498 - DNA, 225 bp, unidentified; identical to SEQ ID NO: 62
  misc_feature 1..225: note = Ascusbbf_944A, encodes 16S rRNA
  source 1..225: mol_type = genomic DNA

SEQ ID NO: 10499 - DNA, 300 bp, unidentified
  misc_feature 1..300: note = Ascusbbf_944B, encodes 16S rRNA
  source 1..300: mol_type = genomic DNA
agagtttgatcctggctcaggatgaacgctagctacaggcttaacacatgcaagtcgaggggtaacatgaagaaagcttgctttctttgatgacgaccggcgcacgggtgagtatcgcgtatccaacctgcccataagtagggaatagccttgcgaaagtaagattaatgccctatggtttccgttaaagacatctgagatggaataaagatttatcgcttatggatggggatgcgtctgattaggtagtaggcggggtaacggcccacctagccgacgatcagtaggggttctgagagg

SEQ ID NO: 10500 - DNA, 300 bp, unidentified
  misc_feature 1..300: note = Ascusbbf_944C, encodes 16S rRNA
  source 1..300: mol_type = genomic DNA
agagtttgatcctggctcaggatgaacgctagctacaggcttaacacatgcaagtcgaggggtaacatgaagaaagcttgctttctttgatgacgaccggcgcacgggtgagtatcgcgtatccaacctgcccataagtagggaatagccttgcgaaagtaagattaatgccctatggtttccattaaagacatctgagatggaataaagatttatcgcttatggatggggatgcgtctgattaggtagtaggcggggtaacggcccacctagccgacgatcagtaggggttctgagagg

SEQ ID NO: 10501 - DNA, 300 bp, unidentified
  misc_feature 1..300: note = Ascusbbf_944D, encodes 16S rRNA
  source 1..300: mol_type = genomic DNA
agagtttgatcatggctcaggatgaacgctagctacaggcttaacacatgcaagtcgaggggtaacatgaagaaagcttgctttctttgatgacgaccggcgcacgggtgagtatcgcgtatccaacctgcccataagtagggaatagccttgcgaaagtaagattaatgccctatggtttccgttaaagacatctgagatggaataaagatttatcgcttatggatggggatgcgtctgattaggtagtaggcggggtaacggcccacctagccgacgatcagtaggggttctgagagg

SEQ ID NO: 10502 - DNA, 300 bp, unidentified
  misc_feature 1..300: note = Ascusbbf_944E, encodes 16S rRNA
  source 1..300: mol_type = genomic DNA
agagtttgatcctggctcaggatgaacgctagctacaggcttaacacatgcaagtcgaggggtaacatgaagaaagcttgctttctttgatgacgaccggcgcacgggtgagtatcgcgtatccaacctgcccataagtagggaatagccttgcgaaagtaagattaatgccctatggtttccattgaagacatctgagatggaataaagatttatcgcttatggatggggatgcgtctgattaggtagtaggcggggtaacggcccacctagccgacgatcagtaggggttctgagagg

SEQ ID NO: 10503 - DNA, 300 bp, unidentified
  misc_feature 1..300: note = Ascusbbf_944F, encodes 16S rRNA
  source 1..300: mol_type = genomic DNA
agagtttgatcctggctcaggatgaacgctagctacaggcttaacacatgcaagtcgaggggtaacatgaagaaagcttgctttctttgatgacgaccggcgcacgggtgagtatcgcgtatccaacctgcccataagtagggaatagccttgcgaaagtaagattaatgccctatggtttccgtcgtagacatcttagatggaataaagatttatcgcttatggatggggatgcgtctgattaggtagtaggcggggtagcggcccacctagccgacgatcagtaggggttctgagagg

SEQ ID NO: 10504 - DNA, 300 bp, unidentified
  misc_feature 1..300: note = Ascusbbf_944G, encodes 16S rRNA
  source 1..300: mol_type = genomic DNA
agagtttgatcatggctcaggatgaacgctagctacaggcttaacacatgcaagtcgaggggtaacatgaagaaagtttgctttctttgatgacgaccggcgcacgggtgagtatcgcgtatccaacctgcccataagtagggaatagccttgcgaaagtaagattaatgccctatggcttccattgaaggcatctgagatggaataaagatttatcgcttatggatggggatgcgtctgattaggtagtaggcggggtaacggcccacctagccgacgatcagtaggggttctgagagg

SEQ ID NO: 10505 - DNA, 297 bp, unidentified
  misc_feature 1..297: note = Ascusbbf_23033A, encodes 16S rRNA
  source 1..297: mol_type = genomic DNA
agagtttgatcctggctcaggatgaacgctggcggcgtgcttaatacatgcaagtcgaacggatgagatcaggcagcttgctgtctgattgatttagtggcgaacgggtgagtaatacgtaggcaacctgccccaaagcgggggatagcagttggaaacgactattaataccgcataggtaatcttgaggcatcttgagattattaaaggtgcgtttgcaccgctgtgggatgggcttacgctgtattagcttgttggtgaggtaacggcccaccaaggcgatgatacatagccggt

SEQ ID NO: 10506 - DNA, 297 bp, unidentified
  misc_feature 1..297: note = Ascusbbf_23033B, encodes 16S rRNA
  source 1..297: mol_type = genomic DNA
agagtttgatcatggctcaggatgaacgctggcggcgtgcttaatacatgcaagtcgaacggatgagatcagacagcttgctgcctgattgattcagtggcgaacgggtgagtaatacgtaggcaacctgccccaaagcgggggatagcagttggaaacgactattaataccgcataggtaatcttgaggcatcttgagattattaaaggtgcgtttgcaccgctgtgggatgggcttacgctgtattagcttgttggtgaggtaacggcccaccaaggcgatgatacatagccggt

SEQ ID NO: 10507 - DNA, 297 bp, unidentified
  misc_feature 1..297: note = Ascusbbf_23033C, encodes 16S rRNA
  source 1..297: mol_type = genomic DNA
agagtttgatcctggctcaggatgaacgctggcggcgtgcttaatacatgcaagtcgaacggatgagatcagacagcttgctgcctgattgattcagtggcgaacgggtgagtaatacgtaggcaacctgccccaaagcgggggatagcagttggaaacgactattaataccgcataggtaatcttgaggcatcttgagattattaaaggtgcgtttgcaccgctgtgggatgggcttacgctgtattagcttgttggtgaggtaacggcccaccaaggcgatgatacatagccggt

SEQ ID NO: 10508 - DNA, 297 bp, unidentified
  misc_feature 1..297: note = Ascusbbf_23033D, encodes 16S rRNA
  source 1..297: mol_type = genomic DNA
agagtttgatcatggctcaggatgaacgctggcggcgtgcttaatacatgcaagtcgaacggatgagatcaggcagcttgctgtctgattgatttagtggcgaacgggtgagtaatacgtaggcaacctgccccaaagcgggggatagcagttggaaacgactattaataccgcataggtaatcttgaggcatcttgagattattaaaggtgcgtttgcaccgctgtgggatgggcttacgctgtattagcttgttggtgaggtaacggcccaccaaggcgatgatacatagccggt

SEQ ID NO: 10509 - DNA, 225 bp, unidentified
  misc_feature 1..225: note = Ascusbbf_2600A, encodes 16S rRNA
  source 1..225: mol_type = genomic DNA
agagtttgatcatggctcagattgaacgctggcggcatgccttacacatgcaagtcgaacggcagcgggggagcttgctcctgccggcgagtggcgaacgggtgagtaatgcatcggaacgtgtcctgtcgtgggggataactggccgaaaggtcagctaataccgcatgagacccgagggtgaaagcgggggatcgcaagacctcgcgcgactggagcggccga

SEQ ID NO: 10510 - DNA, 299 bp, unidentified
  misc_feature 1..299: note = Ascusbbf_2600B, encodes 16S rRNA
  source 1..299: mol_type = genomic DNA
agagtttgatcctggctcagattgaacgctggcggcatgccttacacatgcaagtcgaacggcagcgggggagcttgctcctgccggcgagtggcgaacgggtgagtaatgcatcggaacgtgtcctgtcgtgggggataactggccgaaaggtcagctaataccgcatgagacccgagggtgaaagcgggggatcgcaagacctcgcgcgactggagcggccgatgtctgattagctggttggtggggtaaaagcttaccaaggcgacgatcagtagctggtctgagaggatgatcag

SEQ ID NO: 10511 - DNA, 299 bp, unidentified
  misc_feature 1..299: note = Ascusbbf_2600C, encodes 16S rRNA
  source 1..299: mol_type = genomic DNA
agagtttgatcatggctcagattgaacgctggcggcatgccttacacatgcaagtcgaacggcagcgggggagcttgctcctgccggcgagtggcgaacgggtgagtaatgcatcggaacgtgtcctgtcgtgggggataactggccgaaaggtcagctaataccgcatgagacccgagggtgaaagcgggggatcgcaagacctcgcgcgactggagcggccgatgtctgattagctggttggtggggtaaaagcttaccaaggcgacgatcagtagctggtctgagaggatgatcag

SEQ ID NO: 10512 - DNA, 299 bp, unidentified
  misc_feature 1..299: note = Ascusbbf_2600D, encodes 16S rRNA
  source 1..299: mol_type = genomic DNA
agagtttgatcatggctcagattgaacgctggcggcatgccttacacatgcaagtcgaacggcagcgggggagcttgctcctgccggcgagtggcgaacgggtgagtaatgcatcggaacgtgtcctgtcgtgggggataactgaccgaaaggtcagctaataccgcatgagacccgagggtgaaagcgggggatcgcaagacctcgcgcgactggagcggccgatgtctgattagctggttggtggggtaaaagcttaccaaagcgacgatcagtagctggtctgagaggatgatcag

SEQ ID NO: 10513 - DNA, 299 bp, unidentified
  misc_feature 1..299: note = Ascusbbf_2600E, encodes 16S rRNA
  source 1..299: mol_type = genomic DNA
agagtttgatcctggctcagattgaacgctggcggcatgccttacacatgcaagtcgaacggcagcgggggagcttgctcctgccggcgagtggcgaacgggtgagtaatgcatcggaacgtgtcctgtcgtgggggataactgaccgaaaggtcagctaataccgcatgagacccgagggtgaaagcgggggatcgcaagacctcgcgcgactggagcggccgatgtctgattagctggttggtggggtaaaagcttaccaaagcgacgatcagtagctggtctgagaggatgatcag

SEQ ID NO: 10514 - DNA, 299 bp, unidentified
  misc_feature 1..299: note = Ascusbbf_2600F, encodes 16S rRNA
  source 1..299: mol_type = genomic DNA
agagtttgatcatggctcaggacgaacgctggcggcatgccttacacatgtaagtcgaacggcagcgggggagcttgctcctgccggcgagtggcgaacgggtgagtaatgcatcggaacgtgtcctgtcgtgggggataactggccgaaaggtcagctaataccgcatgagacccgagggtgaaagcgggggatcgcaagacctcgcgcgactggagcggccgatgtctgattagctggttggtggggtaaaagcttaccaaggcgacgatcagtagctggtctgagaggatgatcag

SEQ ID NO: 10515 - DNA, 300 bp, unidentified
  misc_feature 1..300: note = Ascusbbf_2600G, encodes 16S rRNA
  source 1..300: mol_type = genomic DNA
agatttgattatggctcagattgaacgctggcggcatgccttacacatgcaagtcgaacggcagcgggggagttgctcctgccggcgagtggcgaacgggtgagtaatgcatcggaacgtgtcctgtcgtgggggataactggccgaaaggtcagctaataccgcatgagacccgagggtgaaagcgggggatcgcaagacctcgcgcgactggagcggccgatgtctgattagctggttggtggggtaaaagcttaccaaggcgacgatcagtagctggtctgagaggatgatcagcca

SEQ ID NO: 10516 - DNA, 301 bp, unidentified
  misc_feature 1..301: note = Ascusbbf_2600H, encodes 16S rRNA
  source 1..301: mol_type = genomic DNA
agagtttgatcctggctcagattgaacgctggcggcaggcctaatacatgcaagtcgaacggtaacataaaagaagcttgcttcttttgatgacgagtggcggacgggtgagtaatatttgggaaactacctgatagagggggacaacagttggaaacgactgctaataccgcataaagcctaagggtgaaagcagcaatgcgctatcagatgtgcccaaacgggattagctagtaggtgaggtaaaggctcacctaggcgacgatctctagctggtctgagaggatgatcagccacattg

SEQ ID NO: 10517 - DNA, 300 bp, unidentified
  misc_feature 1..300: note = Ascusbbf_8118A, encodes 16S rRNA
  source 1..300: mol_type = genomic DNA
agagtttgatcctggctcaggatgaacgctagctacaggcttaacacatgcaagtcgaggggcatcatgtgaggacttcggtcctttcgatggcgaccggcgaatgggtgagtaacacgtatccgacctgccctgtactggaggatagcctcccgaaagggaaattaatactccatgtgtcatgttgcttcatggtggcatgatgaaagatttatcggtacaggatggggatgcgttccattagccagccggcggggtaacggcccaccggggcgacgatggataggggttctgagagga

SEQ ID NO: 10518 - DNA, 300 bp, unidentified
  misc_feature 1..300: note = Ascusbbf_8118B, encodes 16S rRNA
  source 1..300: mol_type = genomic DNA
agagtttgatcatggctcaggatgaacgctagctacaggcttaacacatgcaagtcgaggggcatcatgtgaggacttcggtcctttcgatggcgaccggcgaatgggtgagtaacacgtatccgacctgccctgtactggaggatagcctcccgaaagggaaattaatactccatgtgtcatgttgcttcatggtggcatgatgaaagatttatcggtacaggatggggatgcgttccattagccagccggcggggtaacggcccaccggggcgacgatggataggggttctgagagga

SEQ ID NO: 10519 - DNA, 300 bp, unidentified
  misc_feature 1..300: note = Ascusbbf_201A, encodes 16S rRNA
  source 1..300: mol_type = genomic DNA
agagtttgatcctggctcaggatgaacgctagctacaggcttaacacatgcaagtcgaggggcagcatatagatagcttgctatttatgatggcgaccggcgcacgggtgagtaacgcgtatccaaccttccctatactagagaatagcccggcgaaagtcggattaatgctctatgttcttctttgatggcatctgacgagaagcaaaggtttaccggtataggatggggatgcgtctgattaggttgttggcggggtaacggcccaccaagcctacgatcagtaggggttctgagagg

SEQ ID NO: 10520 - DNA, 301 bp, unidentified
  misc_feature 1..301: note = Ascusbbf_201J, encodes 16S rRNA
  source 1..301: mol_type = genomic DNA
agagtttgatcatggctcaggatgaacgctagctacaggcttaacacatgcaagtcgaggggcagcatatagatagcttgctatttatgatggcgaccggcgcacgggtgagtaacgcgtatccaaccttccctatactagagaatagcccggcgaaagtcggattaatgctctatgttcttctttgatggcgtctgacgagaagcaaaggtttaccggtataggatggggatgcgtctgattaggttgttggcggggtaacggcccaccaagcctacgatcagtaggggttctgagagga

SEQ ID NO: 10521 - DNA, 301 bp, unidentified
  misc_feature 1..301: note = Ascusbbf_201K, encodes 16S rRNA
  source 1..301: mol_type = genomic DNA
agagtttgatcatggctcaggatgaacgctagctacaggcttaacacatgcaagtcgaggggcagcatatagatagcttgctatttatgatggcgaccggcgcacgggtgagtaacgcgtatccaaccttccctatactagagaatagcccggcgaaagtcggattaatgctctatgttcttctttgatggcatctgacgagaagcaaaggtttaccggtataggatggggatgcgtctgattaggttgttggcggggtaacggcccaccaagcctacgatcagtaggggttctgagagga

SEQ ID NO: 10522 - DNA, 301 bp, unidentified
  misc_feature 1..301: note = Ascusbbf_201L, encodes 16S rRNA
  source 1..301: mol_type = genomic DNA
agagtttgatcctggctcaggacgaacgctggcggcgtgcttaacacatgcaagtcgaacgagacgatttagaagcttgcttttattgagtcgagtggcaaacgggtgagtaacgcgtagacaacctgccgcaaagatggggacaacagtccgaaaggactgctaataccgaatgttgtatctcctccgcatgaaagagatattaaagatggcctctacttgtaagctatcgctttgcgatgggtctgcgtctgattagctagttggtggggcaacggcctaccaaggcaacgatcagtag

SEQ ID NO: 10523 - DNA, 300 bp, unidentified
  misc_feature 1..300: note = Ascusbbf_10712A, encodes 16S rRNA
  source 1..300: mol_type = genomic DNA
agagtttgatcctggctcaggacgaacgctggcggcgtgcttaacacatgcaagtcgaacgagaagagatgagaagcttgcttcttattgattcgagtggcaaacgggtgagtaacgcgtaagcaacctgcccttcagatggggacaacagctggaaacggctgctaataccgaatacgttctttctgccgcatgacagagggaagaaagggaggctcttcggagctttcgctggaggagggacttgcgtctgattagctagttggaggggtaacggcccaccaaggcgacgatcagtag

SEQ ID NO: 10524 - DNA, 225 bp, unidentified
  misc_feature 1..225: note = Ascusbbf_10712B, encodes 16S rRNA
  source 1..225: mol_type = genomic DNA
agagtttgatcatggctcaggacgaacgctggcggcgtgcttaacacatgcaagtcgaacgagaagagatgagaagcttgcttcttattgattcgagtggcaaacgggtgagtaacgcgtaagcaacctgcccttcagatggggacaacagctggaaacggctgctaataccgaatacgttctttttgtcgcatggcagagggaagaaagggaggctcttcggag

SEQ ID NO: 10525 - DNA, 300 bp, unidentified
  misc_feature 1..300: note = Ascusbbf_10712C, encodes 16S rRNA
  source 1..300: mol_type = genomic DNA
agagtttgatcctggctcaggacgaacgctggcggcgtgcttaacacatgcaagtcgaacgagaagagatgagaagcttgcttcttattgattcgagtgacaaacgggtgagtaacgcgtaagcaacctgcccttcagatggggacaacagctggaaacggctgctaataccgaatacgttctttttgtcacatggcagagagaagaaagggaggctcttcggagctttcgctgaaggaggggcttgcgtctgattagctagttggaggggtaacggcccaccaaggcgacgatcagtag

SEQ ID NO: 10526 - DNA, 300 bp, unidentified
  misc_feature 1..300: note = Ascusbbf_10712D, encodes 16S rRNA
  source 1..300: mol_type = genomic DNA
agagtttgatcctggctcaggatgaacgccggcggtgtgcctaatacatgcaagtcgaacgagaagagatgagaagcttgcttcttatcgattcgagtggcaaacgggtgagtaacgcgtaagcaacctgcccttcagatggggacaacagctggaaacggctgctaataccgaatacgttctttttgtcgcatggcagagggaagaaagggaggctcttcggagctttcgctgaaggaggggcttgcgtctgattagctagttggaggggtaacggcccaccaaggcgacgatcagtag

SEQ ID NO: 10527 - DNA, 300 bp, unidentified
  misc_feature 1..300: note = Ascusbbf_10712E, encodes 16S rRNA
  source 1..300: mol_type = genomic DNA
agagtttgatcatggctcaggacgaacgctggcggcgtgcttaacacatgcaagtcgaacgagaagagatgagaagcttgcttcttattgattcgagtggcaaacgggtgagtaacgcgtaagcaacctgcccttcagatggggacaacagctggaaacggctgctaataccgaatacgttctttttgtcgcatggcagagggaagaaagggaggctcttcggagctttcgctgaaggaggggcttgcgtctgattagctagttggaggggtaacggcccaccaaggcgacgatcagtag

SEQ ID NO: 10528 - DNA, 300 bp, unidentified
  misc_feature 1..300: note = Ascusbbf_10712F, encodes 16S rRNA
  source 1..300: mol_type = genomic DNA
agagtttgatcatggctcaggacgaacgctggcggcgtgcttaacacatgcaagtcgaacgagaagagatgagaagcttgcttcttattgattcgagtggcaaacgggtgagtaacgcgtaagcaacctgcccttcagatggggacaacagctggaaacggctgctaataccgaatatgttctttttgtcgcatggcagagggaagaaagggaggctcttcggagctttcgctgaaggaggggcttgcgtctgattagctagttggaggggtaacggcccaccaaggcgacgatcagtag

SEQ ID NO: 10529 - DNA, 298 bp, unidentified
  misc_feature 1..298: note = Ascusbbf_10712G, encodes 16S rRNA
  source 1..298: mol_type = genomic DNA
agagtttgatcctggctcaggacgaacgctggcggcgtgcttaacacatgcaagtcgaacgagaagagatgagaagcttgcttcttattgattcgagtggcaaacgggtgagtaacgcgtaagcaacctgcccttcagatggggacaacagctggaaacggctgctaataccgaatacgttctttttgtcgcatggcagagagaagaaagggaggctcttcggagctttcgctgaaggaggggcttgcgtctgattagctagttggaggggtaacggcccaccaaggcgacgatcagt

SEQ ID NO: 10530 - DNA, 300 bp, unidentified
  misc_feature 1..300: note = Ascusbbf_10712H, encodes 16S rRNA
  source 1..300: mol_type = genomic DNA
agagtttgatcctggctcaggacgaacgctggcggcgtgcttaacacatgcaagtcgaacgagaagagatgagaagcttgcttcttatcaattcgagtggcaaacgggtgagtaacgcgtaagcaacctgcccttcagatggggacaacagctggaaacggctgctaataccgaatacgttctttttgtcgcatggcagagggaagaaagggaggctcttcggagctttcgctgaaggaggggcttgcgtctgattagctagttggaggggtaacggcccaccaaggcgacgatcagtag

SEQ ID NO: 10531 - DNA, 300 bp, unidentified
  misc_feature 1..300: note = Ascusbbf_10712I, encodes 16S rRNA
  source 1..300: mol_type = genomic DNA
agagtttgatcatggctcaggacgaacgctggcggcgtgcttaacacatgcaagtcgaacgagaagagatgagaagcttgcttcttattgattcgagtggcaaacgggtgagtaacgcgtaagcaacctgcccttcagatggggacaacagctggaaacggctgctaataccgaatacgttctttctgccgcatgacagagggaagaaagggaggctcttcggagctttcgctggaggagggacttgcgtctgattagctagttggaggggtaacggcccaccaaggcgacgatcagtag

SEQ ID NO: 10532 - DNA, 225 bp, unidentified
  misc_feature 1..225: note = Ascusbbf_6012A, encodes 16S rRNA
  source 1..225: mol_type = genomic DNA
agagtttgatcatggctcagattgaacgctggcggcaggcctaatacatgcaagtcgaacggcagcagggggagtgcttgcactccccgctggcgagtggcggacgggtgagtagtgcctgggaagctgcctggcagagggggacaacagctggaaacggctgctgataccgcatattaccccgagggggaaaggagagatccgctgccggatgcgcccaggcgg

SEQ ID NO: 10533 - DNA, 301 bp, unidentified
  misc_feature 1..301: note = Ascusbbf_6012B, encodes 16S rRNA
  source 1..301: mol_type = genomic DNA
agagtttgatcatggctcagattgaacgctggcggcaggcctaatacatgcaagtcgaacggcagcagggggagtgcttgcactccccgctggcgagtggcggacgggtgagtagtgcctgggaagctgcctggcagagggggacaacagctggaaacggctgctgataccgcatattaccccgagggggaaaggagagatccgctgccggatgcgcccaggcgggattagctggttggcggggcaaaggcccaccaaggcgacgatccctagctggtctgagaggatgatcagccacatt

SEQ ID NO: 10534 - DNA, 301 bp, unidentified
  misc_feature 1..301: note = Ascusbbf_6012C, encodes 16S rRNA
  source 1..301: mol_type = genomic DNA
agagtttgatcatggctcagattgaacgctggcggcaggcctaatacatgcaagtcgaacggcagcagggggagtgcttgcacttcccgctggcgagtggcggacgggtgagtagtgcctgggaagctgcctggcagagggggacaacagctggaaacggctgctgataccgcatattaccccgagggggaaaggagagatccgctgccggatgcgcccaggcgggattagctagttggcggggcaaaggcccaccaaggcgacgatccctagctggtctgagaggatgatcagccacatt

SEQ ID NO: 10535 - DNA, 301 bp, unidentified
  misc_feature 1..301: note = Ascusbbf_6012D, encodes 16S rRNA
  source 1..301: mol_type = genomic DNA
agagtttgatcctggctcagattgaacgctggcggcaggcctaatacatgcaagtcgaacggcagcagggggagtgcttgcacttcccgctggcgagtggcggacgggtgagtagtgcctgggaagctgcctggcagagggggacaacagctggaaacggctgctgataccgcatattaccccgagggggaaaggagagatccgctgccggatgcgcccaggcgggattagctagttggcggggcaaaggcccaccaaggcgacgatccctagctggtctgagaggatgatcagccacatt

SEQ ID NO: 10536 - DNA, 301 bp, unidentified
  misc_feature 1..301: note = Ascusbbf_6012E, encodes 16S rRNA
  source 1..301: mol_type = genomic DNA
agagtttgatcctggctcagattgaacgctggcggcaggcctaatacatgcaagtcgaacggcagcagggggagtgcttgcactccccgctggcgagtggcggacgggtgagtagtgcctgggaagctgcctggcagagggggacaacagctggaaacggctgctgataccgcatattaccccgagggggaaaggagagatccgctgccggatgcgcccaggcggggttagctggttggcggggcaaaggcccaccaaggcgacggtccctagctggtctgagaggatgatcagccacatt

SEQ ID NO: 10537 - DNA, 300 bp, unidentified
  misc_feature 1..300: note = Ascusbbf_2297A, encodes 16S rRNA
  source 1..300: mol_type = genomic DNA
agagtttgatcctggctcagaacgaacgctggcggcgcatcttaagcatgcaagtcgagcggtaagttggaagcttgcttctaacctagagcggcggactggtgagtaacgcgtgggtgacgtacctctgtgacggggacagctcctagaaataggagataataccggatacgctgtgtgctgtcagagggcacacaggaaaggatcttttgattcgcacagagagcggcccgcgtactattagctggttggtgaggtaacggcccaccaaggcgacgatagttacccggcctaagaggg

SEQ ID NO: 10538 - DNA, 300 bp, unidentified
  misc_feature 1..300: note = Ascusbbf_2297B, encodes 16S rRNA
  source 1..300: mol_type = genomic DNA
agagtttgatcctggctcaggatgaacgctagctacaggcttaacacatgcaagtcgaggggcagcaggattctagcttgctagaattgctggcgaccggcgcacgggtgagtaacgcgtatccaacctggcccttagtagaggatagcccggcgaaagtcggattaatactctatgttctccaatgcgggcatctaatttggagcaaagatttatcgctatgggatggggatgcgtctgattagcttgtcggcggggtaacggcccaccgaggcaacgatcagtaggggttctgagagg

SEQ ID NO: 10539 - DNA, 301 bp, unidentified
  misc_feature 1..301: note = Ascusbbf_2297C, encodes 16S rRNA
  source 1..301: mol_type = genomic DNA
agagtttgatcctggctcagaacgaacgctggcggcgcgtcttaagcatgcaagtcgagcggtaagttggaagcttgcttctaacctagagcggcggactggtgagtaacgcgtgggtgacgtacctctgtgacggggacagctcctagaaataggagataataccggatacgctgcatgttgtcagaggacatgcaggaaaggatcttttgattcgcacagagagcggcccgcgtactattagctagttggtgaggtaacggcccaccaaggcgacgatagttacccggcctaagagggg

SEQ ID NO: 10540 - DNA, 301 bp, unidentified
  misc_feature 1..301: note = Ascusbbf_2297D, encodes 16S rRNA
  source 1..301: mol_type = genomic DNA
agagtttgatcctggctcagaacgaacgctggcggcgcgtcttaagcatgcaagtcgagcggtaagtcgggagcttgctcctgacctagagcggcggactggtgagtaacgcgtgggtgacgtacctctgtgacggggacagctcctagaaataggagataataccggatacgctgcatgttgtcagaggacatgcaggaaaggatcttttgattcgcacagagagcggcccgcgtactattagctggttggtgaggtaacggcccaccaaggcgacgatagttacccggcctaagagggg

SEQ ID NO: 10541 - DNA, 301 bp, unidentified
  misc_feature 1..301: note = Ascusbbf_2297E, encodes 16S rRNA
  source 1..301: mol_type = genomic DNA
agagtttgatcctggctcagaacgaacgctggcggcgcgtcttaagcatgcaagtcgagcggtaagtcgggagcttgctcctgacctagagcggcggactggtgagtaacgcgtgggtgacgtacctctgtgacggggacagctcctagaaataggagataataccggatacgctgcatgttgtcagaggacatgcaggaaaggatcttttgattcgcacagagagcggcccgcgtactattagctagttggtgaggtaacggcccaccaaggcgacgatagttacccggcctaagagggg

SEQ ID NO: 10542 - DNA, 301 bp, unidentified
  misc_feature 1..301: note = Ascusbbf_2297F, encodes 16S rRNA
  source 1..301: mol_type = genomic DNA
agagtttgatcatggctcagaacgaacgctggcggcgcgtcttaagcatgcaagtcgagcggtaagatggaagcttgcttctatcctagagcggcggactggtgagtaacgcgtgggtgacgtacctttgtgacggggacagctcctagaaataggagataataccggatacgctgcatgttgtcagaggacatgcaggaaaggatcttttgattcgcacagagagcggcccgcgtactattagctagttggtggggtaacggcccaccaaggcgacgatagttacccggcctaagagggg

SEQ ID NO: 10543 - DNA, 301 bp, unidentified
  misc_feature 1..301: note = Ascusbbf_2297G, encodes 16S rRNA
  source 1..301: mol_type = genomic DNA
agagtttgatcatggctcagaacgaacgctggcggcgcgtcttaagcatgcaagtcgagcggtaagttggaagcttgcttctaacctagagcggcggactggtgagtaacgcgtgggtgacgtacctctgtgacggggacagctcctagaaataggagataataccggatacgctgcatgttgtcagaggacatgcaggaaaggatcttttgattcgcacagagagcggcccgcgtactattagctagttggtgaggtaacggcccaccaaggcgacgatagttacccggcctaagagggg

SEQ ID NO: 10544 - DNA, 301 bp, unidentified
  misc_feature 1..301: note = Ascusbbf_2297H, encodes 16S rRNA
  source 1..301: mol_type = genomic DNA
agagtttgatcctggctcagaacgaacgctggcggcgcgtcttaagcatgcaagtcgagcggtaagtcgggagcttgctcctgacctagagcggcggactggtgagtaacgcgtgggtgacgtacctctgtgacggggacagctcctagaaataggagataataccggatacgctgcatgttgtcagaggacatgcaggaaaggatcttttgattcgcacagagagcggcccgcgtactattagctggttggtgaggtaacggcccaccaaggcgacgataggtacccggcctaagagggg

SEQ ID NO: 10545 - DNA, 298 bp, unidentified; identical to SEQ ID NO: 10425
  misc_feature 1..298: note = Ascusbbf_873A, encodes 16S rRNA
  source 1..298: mol_type = genomic DNA

SEQ ID NO: 10546 - DNA, 299 bp, unidentified
  misc_feature 1..299: note = Ascusbbf_873B, encodes 16S rRNA
  source 1..299: mol_type = genomic DNA
agagtttgatcctggctcaggacgaacgctggcggcgtgcttaacacatgcaagtcgaacgagaatctgtggatcgaggattcgtccaagtgaagcagaggacagtggcggacgggtgagtaacgcgtgaggaacctgcctttcagagggggacaacagttggaaacgactgctaataccgcatgatacatttgggtggcatcatctgaatgtcaaagatttatcgctgaaagatggcctcgcgtctgattagctagttggtgaggtaacggcccaccaaggcgacgatcagtagccgg

SEQ ID NO: 10547 - DNA, 300 bp, unidentified
  misc_feature 1..300: note = Ascusbbf_873C, encodes 16S rRNA
  source 1..300: mol_type = genomic DNA
agagtttgatcatggctcaggacgaacgctggcggcgtgcttaacacatgcaagtcgaacgagaatctgtggatcgaggattcgtccaagtgaagcagaggacagtggcggacgggtgagtaacgcgtgaggaacctgcctttcagagggggacaacagttggaaacgactgctaataccgcatgacacattcgagcggcatcgcttgaatgtcaaagatttatcgctgaaagatggcctcgcgtctgattagctagttggtgaggtaacggcccaccaaggcgacgatcagtagccgga

SEQ ID NO: 10548 - DNA, 300 bp, unidentified
  misc_feature 1..300: note = Ascusbbf_873D, encodes 16S rRNA
  source 1..300: mol_type = genomic DNA
agagtttgatcctggctcaggacgaacgctggcggcgtgcttaacacatgcaagtcgaacgagaatctgtggatcgaggattcgtccaagtgaagcagaggacagtggcggacgggtgagtaacgcgtgaggaacctgcctttcagagggggacaacagttgggaacgactgctaataccgcatgatacatttgggtggcatcatctgaatgtcaaagatttatcgctgaaagatggcctcgcgtctgattagctagttggtgaggtaacggcccaccaaggcgacgatcagtagccggg

SEQ ID NO: 10549 - DNA, 300 bp, unidentified
  misc_feature 1..300: note = Ascusbbf_873E, encodes 16S rRNA
  source 1..300: mol_type = genomic DNA
agagtttgatcctggctcaggacgaacgctggcggcgtgcttaacacatgcaagtcgaacgagaatctgtggatcgaggattcgtccaagtgaagcagaggacagtggcggacgggtgagtaacgcgtgaggaacctgcctttcagagggggacaacagttggaaacgactgctaataccgcatgacacattcgagcggcatcgcttgaatgtcaaagatttatcgctgaaagatggcctcgcgtctgattagctagttggtgaggtaacggcccaccaaggcgacgatcagtagccgga

SEQ ID NO: 10550 - DNA, 300 bp, unidentified
  misc_feature 1..300: note = Ascusbbf_873F, encodes 16S rRNA
  source 1..300: mol_type = genomic DNA
agagtttgatcatggctcaggacgaacgctggcggcgtgcttaacacatgcaagtcgaacgagaatctgtggatcgaggattcgtccaagtgaagcagaggacagtggcggacgggtgagtaacgcgtgaggaacctgcctttcagagggggacaacagttggaaacgactgctaataccgcatgatacatttgggtggcatcatctgaatgtcaaagatttatcgctgaaagatggcctcgcgtctgattagctagttggtgaggtaacggcccaccaaggcgacgatcagtagccgga

SEQ ID NO: 10551 - DNA, 300 bp, unidentified
  misc_feature 1..300: note = Ascusbbf_873G, encodes 16S rRNA
  source 1..300: mol_type = genomic DNA
agagtttgatcatggctcagagcgaacgctggcggcgtgcttaacacatgcaagtcgaacgagaatctgtggatcgaggattcgtccaagtgaagcagaggacagtggcggacgggtgagtaacgcgtgaggaacctgcctttcagagggggacaacagttggaaacgactgctaataccgcatgacacattcgagcggcatcgcttgaatgtcaaagatttatcgctgaaagatggcctcgcgtctgattagctagttggtgaggtaacggcccaccaaggcgacgatcagtagccgga

SEQ ID NO: 10552 - DNA, 300 bp, unidentified
  misc_feature 1..300: note = Ascusbbf_269A, encodes 16S rRNA
  source 1..300: mol_type = genomic DNA
agagtttgatcctggctcaggacgaacgctggcggcgtgcttaacacatgcaagtcgaacggaaaggccccgctcgcggggtactcgagtggcgaacgggtgagtaacacgtgggtgatctgccctgcacttcgggataagcctgggaaactgggtctaataccggatatgacctccctttagtgtggggggtggaaagatttatcggtgcaggatgagcccgcggcctatcagcttgttggtggggtaatggcctaccaaggcgtcgacgggtagccggcctgagagggtggacggcca

SEQ ID NO: 10553 - DNA, 300 bp, unidentified
  misc_feature 1..300: note = Ascusbbf_269B, encodes 16S rRNA
  source 1..300: mol_type = genomic DNA
agagtttgatcatggctcaggacgaacgctggcggcgtgcttaacacatgcaagtcgaacggaaaggccccgctcgcggggtactcgagtggcgaacgggtgagtaacacgtgggtgatctgccctgcacttcgggataagcctgggaaactgggtctaataccggataggaccctcctttagtgtggggggtggaaagtttttcggtgcaggatgagcccgcggcctatcagcttgttggtggggtaatggcctaccaaggcgtcgacgggtagccggcctgagagggtggacggccac

SEQ ID NO: 10554 - DNA, 300 bp, unidentified
  misc_feature 1..300: note = Ascusbbf_269C, encodes 16S rRNA
  source 1..300: mol_type = genomic DNA
agagtttgatcatggctcaggacgaacgctggcggcgtgcttaacacatgcaagtcgaacggaaaggccccgctcgcggggtactcgagtggcgaacgggtgagtaacacgtgggtgatctgccctgcacttcgggataagcctgggaaactgggtctaataccggatatgacctccctttagtgtggggggtggaaagatttatcggtgcaggatgagcccgcggcctatcagcttgttggtggggtaatggcctaccaaggcgtcgacgggtagccggcctgagagggtggacggcca

SEQ ID NO: 10555 - DNA, 300 bp, unidentified
  misc_feature 1..300: note = Ascusbbf_269D, encodes 16S rRNA
  source 1..300: mol_type = genomic DNA
agagtttgatcctggctcaggacgaacgctggcggcgtgcttaacacatgcaagtcgaacggaaaggccccgcttgcggggtactcgagtggcgaacgggtgagtaacacgtgggtgatctgccctgcacttcgggataagcctgggaaactgggtctaataccggatatgacctccctttagtgtggggggtggaaagatttatcggtgcaggatgagcccgcggcctatcagcttgttggtggggtaatggcctaccaaggcgtcgacgggtagccggcctgagagggtggacggcca

SEQ ID NO: 10556 - DNA, 300 bp, unidentified
  misc_feature 1..300: note = Ascusbbf_269E, encodes 16S rRNA
  source 1..300: mol_type = genomic DNA
agagtttgatcatggctcaggacgaacgctggcggcgtgcttaacacatgcaagtcgaacggaaaggccccgcttgcggggtactcgagtggcgaacgggtgagtaacacgtgggtgatctgccctgcacttcgggataagcctgggaaactgggtctaataccggataggacccctctttagtgtggggggtggaaagttttttcggtgtgggatgagcccgcggcctatcagcttgttggtggggtaatggcctaccaaggcgtcgacgggtagccggcctgagagggtggacggcca

SEQ ID NO: 10557 - DNA, 298 bp, unidentified; identical to SEQ ID NO: 10425
  misc_feature 1..298: note = Ascusbbf_269F, encodes 16S rRNA
  source 1..298: mol_type = genomic DNA

SEQ ID NO: 10558 - DNA, 298 bp, unidentified; identical to SEQ ID NO: 10425
  misc_feature 1..298: note = Ascusbbf_269G, encodes 16S rRNA
  source 1..298: mol_type = genomic DNA

SEQ ID NO: 10559 - DNA, 300 bp, unidentified
  misc_feature 1..300: note = Ascusbbf_41015A, encodes 16S rRNA
  source 1..300: mol_type = genomic DNA
agagtttgatcatggctcaggatgaacgctggcggcgtgcttaacacatgcaagtcgaacgattaacccatcttcggatggttataaagtggcgaacgggtgagtaacacgtgaccaacctgcctttcacattgggataactaagggaaactgtagctaataccaaatactccggcacctccgcatggtagtgccgggaaagctccggcggtgaaagatggggtcgcggcccattaggtagttggtggggtaacggcctaccaagcccgcgatgggtagccgggttgagagactgatcgg

SEQ ID NO: 10560 - DNA, 300 bp, unidentified
  misc_feature 1..300: note = Ascusbbf_41015B, encodes 16S rRNA
  source 1..300: mol_type = genomic DNA
agagtttgatcctggctcaggatgaacgctggcggcgtgcttaacacatgcaagtcgaacgattaacccatcttcggatggttataaagtggcgaacgggtgagtaacacgtgaccaacctgcctttcacattgggataactaagggaaactgtagctaataccaaatactccggcacctccgcatggtagtgccgggaaagctccggcggtgaaagatggggtcgcggcccattaggtagttggtggggtaacggcctaccaagcccatgatgggtagccgggttgagagactgatcgg

SEQ ID NO: 10561 - DNA, 300 bp, unidentified
  misc_feature 1..300: note = Ascusbbf_41015C, encodes 16S rRNA
  source 1..300: mol_type = genomic DNA
agagtttgatcctggctcaggatgaacgctggcggcgtgcttaacacatgcaagtcgaacgattaacccatcttcggatggttataaagtggcgaacgggtgagtaacacgtgactaacctgcctttcacattgggataactaccggaaacgatagctaataccaaatactccggcacttccgcatggtcgtgccgggaaagctccggcggtgaaagatggggtcgcggcccattaggtagttggtggggtaacggcctaccaagcccgcgatgggtagccgggttgagagactgatcgg

SEQ ID NO: 10562 - DNA, 300 bp, unidentified
  misc_feature 1..300: note = Ascusbbf_41015D, encodes 16S rRNA
  source 1..300: mol_type = genomic DNA
agagtttgatcctggctcaggatgaacgctggcggcgtgcttaacacatgcaagtcgaacgattaacccatcttcggatggttataaagtggcgaacgggtgagtaacacgtgaccaacctgcctttcacattgggataactattggaaacgatagctaataccaaatactccggtacctccgcatggcggttccgggaaagctccggcggtgaaagatggggtcgcggcccattaggtagttggtggggtaacggcctaccaagcccgcgatgggtagccgggttgagagactgatcgg

SEQ ID NO: 10563 - DNA, 300 bp, unidentified
  misc_feature 1..300: note = Ascusbbf_41015E, encodes 16S rRNA
  source 1..300: mol_type = genomic DNA
agagtttgatcatggctcaggatgaacgctggcggcgtgcttaacacatgcaagtcgaacgattaacccatcttcggatggttataaagtggcgaacgggtgagtaacacgtgaccaacctgcctttcacattgggataactattggaaacgatagctaataccaaatactccggtacctccgcatggcggttccgggaaagctccggcggtgaaagatggggtcgcggcccattaggtagttggtggggtaacggcctaccaagcccgcgatgggtagccgggttgagagactgatcgg

SEQ ID NO: 10564 - DNA, 300 bp, unidentified; identical to SEQ ID NO: 10563
  misc_feature 1..300: note = Ascusbbf_32877A, encodes 16S rRNA
  source 1..300: mol_type = genomic DNA

SEQ ID NO: 10565 - DNA, 300 bp, unidentified
  misc_feature 1..300: note = Ascusbbf_57294A, encodes 16S rRNA
  source 1..300: mol_type = genomic DNA
agagtttgatcatggctcaggatgaacgctggcggcgtgcttaacacatgcaagtcgagcgaagcacttaagtttgattcttcggatgaagacttttgtgactgagcggcggacgggtgagtaacgcgtgggtaacctgcctcatacagggggataacagctagaaatgactgctaataccgcataagaccacggtaccgcatggtacagtggtaaaaactccggtggtatgagatggacccgcgtctgattaggtagttggtggggtaacggcctaccaagccgacgatcagtagccga

SEQ ID NO: 10566 - DNA, 300 bp, unidentified
  misc_feature 1..300: note = Ascusbbf_57294B, encodes 16S rRNA
  source 1..300: mol_type = genomic DNA
agagtttgatcctggctcaggatgaacgctggcggcgtgcttaacacatgcaagtcgagcgaagcacttaagtttgattcttcggatgaagacttttgtgactgagcggcggacgggtgagtaacgcgtgggtaacctgcctcatacagggggataacagttagaaatgactgctaataccgcataagaccacggtaccgcatggtacagtggtaaaaactccggtggtatgagatggacccgcgtctgattaggtagttggtggggtaacggcctaccaagccgacgatcagtagccga

SEQ ID NO: 10567 - DNA, 299 bp, unidentified
  misc_feature 1..299: note = Ascusbbf_57294C, encodes 16S rRNA
  source 1..299: mol_type = genomic DNA
agagtttgatcatggctcaggatgaacgctggcggcgtgcttaacacatgcaagtcgagcgaagcacttaggtttgattcttcggatgaagacctttgtgactgagcagcggacgggtgagtaacgcgtgggtaacctgcctcatacagggggataacagttagaaatgactgctaataccgcataagaccacggtaccgcatggtacagtggtaaaaactccggtggtatgagatggacccgcgtctgattaggtagttggtggggtaacggcctaccaagccgacgatcagtagccg

SEQ ID NO: 10568 - DNA, 299 bp, unidentified
  misc_feature 1..299: note = Ascusbbf_27932A, encodes 16S rRNA
  source 1..299: mol_type = genomic DNA
agagtttgatcctggctcaggatgaacgctggcggcgtgcctaacacatgcaagtcgaacgaagtttgtttctacccgacggattatcttcggataagaagtcatttgaaacgcttagtggcggacgggtgagtaacgcgtgggcaacctgccctgcacagggggatagcagttggaaacgactggtaataccgcatatattgcatttgccgcatgacagatgcaagaaaacgtttagtggtgcaggatgggcccgcgtccgattagttagttggtggggtaacggcctaccaagacga

SEQ ID NO: 10569 - DNA, 301 bp, unidentified
  misc_feature 1..301: note = Ascusbbf_27932B, encodes 16S rRNA
  source 1..301: mol_type = genomic DNA
agagtttgatcatggctcaggatgaacgctggcggcgtgcctaacacatgcaagtcgaacgaagtttgtttctacccgacggattatcttcggataagaagtcatttgaaacgcttagtggcggacgggtgagtaacgcgtgggcaacctgccctgcacagggggatagcagttggaaacgactggtaataccgcatatattgcatttgccgcatgacagatgcaagaaaacgtttagtggtgcaggatgggcccgcgtccgattagttagttggtggggtaacggcctaccaagacgacg

SEQ ID NO: 10570 - DNA, 299 bp, unidentified
  misc_feature 1..299: note = Ascusbbf_27932C, encodes 16S rRNA
  source 1..299: mol_type = genomic DNA
agagtttgatcctggctcaggatgaacgctggcggcgtgcctaacacatgcaagtcgaacgaagtttgtttctacccgacggattatcttcggataagaagtcatttgaaacgcttagtggcggacgggtgagtaacgcgtgggcaacctgccctgcacagggggatagcagttggaaacgactggtaataccgcatatattgcatatgccgcatgacagatgcaagaaaacgtttagtggtgcaggatgggcccgcgtccgattagttagttggtggggtaacggcctaccaagacga

SEQ ID NO: 10571 - DNA, 301 bp, unidentified
  misc_feature 1..301: note = Ascusbbf_22558A, encodes 16S rRNA
  source 1..301: mol_type = genomic DNA
agagtttgatcctggctcaggacgaacgctggcggcgtgcttaacacatgcaagtcgaacggggcgaagaagagcttgctctttggagcctagtggcaaacgggtgagtaacgcgtaggcaacctgcccttcagatggggacaacacctcgaaaggggtgctaataccgaatgacgtatgctggtcgcatgaccggcataccaaaggccgggcaaccggtcactgaaggatgggcctgcgtctgattagctagttggtggggtaacggcccaccaaggcgacgatcagtagccggtctgag

SEQ ID NO: 10572 - DNA, 301 bp, unidentified
  misc_feature 1..301: note = Ascusbbf_22558B, encodes 16S rRNA
  source 1..301: mol_type = genomic DNA
agagtttgatcatggctcaggatgaacgctggcggcgtgcttaacacatgcaagtcgaacggggcgaagaagagcttgctctttggagcctagtggcaaacgggtgagtaacgcgtaggcaacctgcccttcagatggggacaacacctcgaaaggggtgctaataccgaatgacgtatgctggtcgcatgactgacataccaaaggccgggcaaccggtcactgaaggatgggcctgcgtctgattagctagttggtggggtaacggcccaccaaggcgacgatcagtagccggtctgag

SEQ ID NO: 10573 - DNA, 301 bp, unidentified
  misc_feature 1..301: note = Ascusbbf_983757A, encodes 16S rRNA
  source 1..301: mol_type = genomic DNA
agagtttgatcatggctcaggatgaacgctagctacaggcttaacacatgcaagtcgaggggcagcatgagggtagcaatacctttgatggcgaccggcgcacgggtgcgtaacacgtatccaatctacccatggctcgggaatagcctttcgaaagaaagattaatgcccgatggtctgtgattgagacatctcgattacagtaaagatttatcggcgatggatgaggatgcgtccgattaggtagtaggcggggtaacggcccacctagccgacgatcggtaggggttctgagaggaag

SEQ ID NO: 10574 - DNA, 301 bp, unidentified
  misc_feature 1..301: note = Ascusbbf_983757B, encodes 16S rRNA
  source 1..301: mol_type = genomic DNA
agagtttgatcatggctcaggatgaacgctagctacaggcttaacacatgcaagtcgaggggcagcatgaaggtagcaatacctttgatggcgaccggcgcacgggtgcgtaacacgtatccaatctacccatggctcgggaatagcctttcgaaagaaagattaatgcccgatggtctgtgattgagacatctcgattacagtaaagatttatcggcgatggatgaggatgcgtccgattaggtagtaggcggggtaacggcccacctagccgacgatcggtaggggttctgagaggaag

SEQ ID NO: 10575 - DNA, 301 bp, unidentified
  misc_feature 1..301: note = Ascusbbf_983757C, encodes 16S rRNA
  source 1..301: mol_type = genomic DNA
agagtttgatcctggctcaggatgaacgctagctacaggcttaacacatgcaagtcgaggggcagcatgagggtagcaatacctttgatggcgaccggcgcacgggtgcgtaacacgtatccaatctacccatggctcgggaatagcctttcgaaagaaagattaatgcccgatggtctgtgattgagacatctcgattacagtaaagatttatcggcgatggatgaggatgcgtccgattaggtagtaggcggggtaacggcccacctagccgacgatcggtaggggttctgagaggaag

SEQ ID NO: 10576 - DNA, 298 bp, unidentified; identical to SEQ ID NO: 10425
  misc_feature 1..298: note = Ascusbbf_52330A, encodes 16S rRNA
  source 1..298: mol_type = genomic DNA

SEQ ID NO: 10577 - DNA, 300 bp, unidentified
  misc_feature 1..300: note = Ascusbbf_1085A, encodes 16S rRNA
  source 1..300: mol_type = genomic DNA
agagtttgatcatggctcaggatgaacgctggcggcgtgcttaacacatgcaagtcgagcgaagcacggaaacggatttcttcggactgaaggttctgtgactgagcggcggacgggtgagtaacgcgtggggaacctgccctgtaccgggggataacagacagaaatgtctgctaataccgcataagcgcacgagaaggcatcttcttgtgtgaaaaactccggtggtacaggatggacccgcgttggattagccagttggcggggtaacggcccaccaaagcgacgatccatagccgg

SEQ ID NO: 10578 - DNA, 300 bp, unidentified
  misc_feature 1..300: note = Ascusbbf_1085B, encodes 16S rRNA
  source 1..300: mol_type = genomic DNA
agagtttgatcctggctcaggatgaacgctggcggcgtgcttaacacatgcaagtcgagcgaagcgcagaaacggatttcttcggattgaaggttctgtgactgagcggcggacgggtgagtaacgcgtggggaacctgccctgtaccgggggataacagacagaaatgtctgctaataccgcataagcgcacgagaaggcatcttcttgtgtgaaaaactccggtggtacaggatggacccgcgttggattagccagttggcggggtaacggcccaccaaagcgacgatccatagccgg

SEQ ID NO: 10579 - DNA, 300 bp, unidentified
  misc_feature 1..300: note = Ascusbbf_1085C, encodes 16S rRNA
  source 1..300: mol_type = genomic DNA
agagtttgatcctggctcaggatgaacgctggcggcgtgcttaacacatgcaagtcgagcgaagcacagaaacggatttcttcggattgaaggttctgtgactgagcggcggacgggtgagtaacgcgtggggaacctgccctgtaccgggggataacagacagaaatgtctgctaataccgcataagcgcacgagaaggcatctttttgtgtgaaaaactccggtggtacaggatggacccgcgttggattagccagttggcggggtaatggcccaccaaagcgacgatccatagccgg

SEQ ID NO: 10580 - DNA, 300 bp, unidentified
  misc_feature 1..300: note = Ascusbbf_1085D, encodes 16S rRNA
  source 1..300: mol_type = genomic DNA
agagtttgatcctggctcaggatgaacgctggcggcgtgcttaacacatgcaagtcgagcgaagcacggaaacggatttcttcggattgaaggttctgtgactgagcggcggacgggtgagtaacgcgtggggaacctgccctgtaccgggggataacagacagaaatgtctgctaataccgcataagcgcacgagaaggcatcttcttgtgtgaaaaactccggtggtacaggatggacccgcgttggattagccagttggcggggtaacggcccaccaaagcgacgatccatagccgg

SEQ ID NO: 10581 - DNA, 300 bp, unidentified
  misc_feature 1..300: note = Ascusbbf_1085E, encodes 16S rRNA
  source 1..300: mol_type = genomic DNA
agagtttgatcatggctcaggatgaacgctggcggcgtgcttaacacatgcaagtcgagcgaagcgcagaaacggatttcttcggattgaaggttctgtgactgagcggcggacgggtgagtaacgcgtggggaacctgccctgtaccgggggataacagacagaaatgtctgctaataccgcataagcgcacgagaaggcatcttcttgtgtgaaaaactccggtggtacaggatggacccgcgttggattagccagttggcggggtaacggcccaccaaagcgacgatccatagccgg

SEQ ID NO: 10582 - DNA, 300 bp, unidentified
  misc_feature 1..300: note = Ascusbbf_1085F, encodes 16S rRNA
  source 1..300: mol_type = genomic DNA
agagtttgatcatggctcaggatgaacgctggcggcgtgcttaacacatgcaagtcgagcgaagcacagaaacggatttcttcggaataaaggttctgtgactgagcggcggacgggtgagtaacgcgtggggaacctgccctgtaccgggggataacagacagaaatgtctgctaataccgcataagcgcatgagaaggcatcttcttgtgtgaaaaactccggtggtacaggatggacccgcgttggattagccagttggcggggtaacggcccaccaaagcgacgatccatagccgg

SEQ ID NO: 10583 - DNA, 300 bp, unidentified
  misc_feature 1..300: note = Ascusbbf_1085G, encodes 16S rRNA
  source 1..300: mol_type = genomic DNA
agagtttgatcatggctcaggatgaacgctggcggcgtgcttaacacatgcaagtcgagcgaagcgcttaaccggatttcttcggattgaaggttttgtgactgagcggcggacgggtgagtaacgcgtggggaacctgccctgtaccgggggataacagacagaaatgtctgctaatactgcataagcgcacgaaaaggcatctttttgtgtgaaaaactccggtggtacaggatggacccgcgttggattagccagttggcggggtaacggcccaccaaagcgacgatccatagccgg

SEQ ID NO: 10584 - DNA, 300 bp, unidentified
  misc_feature 1..300: note = Ascusbbf_1085H, encodes 16S rRNA
  source 1..300: mol_type = genomic DNA
agagtttgatcctggctcaggatgaacgctggcggcgtgcttaacacatgcaagtcgagcgaagcgcttaaccggatttcttcggattgaaggttttgtgactgagcggcggacgggtgagtaacgcgtggggaacctgccctgtaccgggggataacagacagaaatgtctgctaataccgcataagcgcacgaaaaggcatctttttgtgtgaaaaactccggtggtacaggatggacccgcgttggattagccagttggcggggtaacggcccaccaaagcgacgatccatagccgg

SEQ ID NO: 10585 - DNA, 300 bp, unidentified
  misc_feature 1..300: note = Ascusbbf_1085I, encodes 16S rRNA
  source 1..300: mol_type = genomic DNA
agagtttgatcatggctcaggatgaacgctggcggcgtgcttaacacatgcaagtcgagcgaagcgctcaaccggatttcttcggattgaaggttttgcgactgagcggcggacgggtgagtaacgcgtggggaacctgccctgtaccgggggataacagacagaaatgtctgctaataccgcataagcgcacgagaaggcatctttttgtgtgaaaaactccggtggtacaggatggacccgcgttggattagccagttggcggggtaacggcccaccaaagcgacgatccatagccgg

SEQ ID NO: 10586 - DNA, 300 bp, unidentified
  misc_feature 1..300: note = Ascusbbf_1085J, encodes 16S rRNA
  source 1..300: mol_type = genomic DNA
agagtttgatcctggctcaggatgaacgctggcggcgtgcttaacacatgcaagtcgagcgaagcacagaaacggatttcttcggattgaaggttctgtgactgagcggcggacgggtgagtaacgcgtggggaacctgccctgtaccgggggataacagacagaaatgtctgctaataccgcataagcgcacgagaaggcatctttttgtgtgaaaaactccggtggtacaggatggacccgcgttggattagccagttggcggggtaacggcccaccaaagcgacgatccatagccgg

SEQ ID NO: 10587 - DNA, 300 bp, unidentified; identical to SEQ ID NO: 10581
  misc_feature 1..300: note = Ascusbbf_1085K, encodes 16S rRNA
  source 1..300: mol_type = genomic DNA

SEQ ID NO: 10588 - DNA, 225 bp, unidentified
  misc_feature 1..225: note = Ascusbbf_154A, encodes 16S rRNA
  source 1..225: mol_type = genomic DNA
agagtttgatcctggctcagattgaacgctggcggcaggcctaatacatgcaagtcgaacggtaacataggaaaagcttgcttttcctgatgacgagtggcggacgggtgagtaaagtttgggaagttacctgatagagggggacaacagttggaaacgactgctaataccgcatacagcctgagggtgaaagcagcaatgcgctatcagatgcgcccaaatggg

SEQ ID NO: 10589 - DNA, 301 bp, unidentified
  misc_feature 1..301: note = Ascusbbf_154B, encodes 16S rRNA
  source 1..301: mol_type = genomic DNA
agagtttgatcctggctcagattgaacgctggcggcaggcctaatacatgcaagtcgaacggtaacataggaaaagcttgcttttcctgatgacgagtggcggacgggtgagtaaagtttgggaagctacctgatagagggggacaacagttggaaacgactgctaataccgcatacagcctgagggtgaaagcagcaatgcgctatcagatgcgcccaaatgggattagctagtaggtgaggtaaaggctcacctaggcgacgatctctagctggtctgagaggatgatcagccacattg

SEQ ID NO: 10590 - DNA, 301 bp, unidentified
  misc_feature 1..301: note = Ascusbbf_154D, encodes 16S rRNA
  source 1..301: mol_type = genomic DNA
agagtttgatcctggctcagattgaacgctggcggcaggcctaatacatgcaagtcgaacggtaacataggaaaagcttgcttttcctgatgacgagtggcggacgggtgagtaaagtttgggaagctacctgatagagggggacaacagttggaaacgactgctaataccgcatacagcctgagggtgaaagcagcaatgcgctatcagatgcgcccaaatgggattagctagtaggtgaggtaaaggctcacctaggcgacgatcagtagccgacctgagagggtgaccggccacattg

SEQ ID NO: 10591 - DNA, 301 bp, unidentified
  misc_feature 1..301: note = Ascusbbf_154E, encodes 16S rRNA
  source 1..301: mol_type = genomic DNA
agagtttgatcatggctcagattgaacgctggcggcaggcctaatacatgcaagtcgaacggtaacataagaaagcttgctttcttgatgacgagtggcggacgggtgagtaatatttgggaagctacctgatagagggggacaacagttggaaacgactgctaataccgcatacagcctgagggtgaaagcagcaatgcgctatcagatgcgcccaaacgggattagctagtaggtgaggtaaaggctcacctaggcgacgatctctagctggtctgagaggatgatcagccacattggg

SEQ ID NO: 10592 - DNA, 301 bp, unidentified
  misc_feature 1..301: note = Ascusbbf_154F, encodes 16S rRNA
  source 1..301: mol_type = genomic DNA
agagtttgatcctggctcagattgaacgctggcggcaggcctaatacatgcaagtcgaacggtaacataagaaagcttgctttcttgatgacgagtggcggacgggtgagtaatatttgggaagctacctgatagagggggacaacagttggaaacgactgctaataccgcatacagcctgagggtgaaagcagcaatgcgctatcagatgcgcccaaacgggattagctagtaggtgaggtaaaggctcacctaggcgacgatctctagctggtctgagaggatgatcagccacattggg

SEQ ID NO: 10593 - DNA, 301 bp, unidentified
  misc_feature 1..301: note = Ascusbbf_154G, encodes 16S rRNA
  source 1..301: mol_type = genomic DNA
agagtttgatcatggctcagattgaacgctggcggcaggcctaatacatgcaagtcgaacggtaacataggaaaagcttgcttttcctgatgacgagtggcggacgggtgagtaaagtttgggaagctacctgatagagggggacaacagttggaaacgactgctaataccgcatacagcctgagggtgaaagcagcaatgcgctatcagatgcgcccaaatgggattagctagtaggtgaggtaaaggctcacctaggcgacgatctctagctggtctgagaggatgatcagccacattg

SEQ ID NO: 10594 - DNA, 301 bp, unidentified
  misc_feature 1..301: note = Ascusbbf_154H, encodes 16S rRNA
  source 1..301: mol_type = genomic DNA
agagtttgatcctggctcagattgaacgctggcggcaggcctaatacatgcaagtcgaacggtaacataggaaaagcctgcttttcctgatgacgagtggcggacgggtgagtaaagtttgggaagttacctgatagagggggacaacagttggaaacgactgctaataccgcatacagcctgagggtgaaagcagcaatgcgctatcagatgcgcccaaatgggattagctagtaggtgaggtaaaggctcacctaggcgacgatctctagctggtctgagaggatgatcagccacattg

SEQ ID NO: 10595 - DNA, 301 bp, unidentified
  misc_feature 1..301: note = Ascusbbf_154I, encodes 16S rRNA
  source 1..301: mol_type = genomic DNA
agagtttgatcatggctcagattgaacgctggcggcaggcctaatacatgcaagtcgaacggtaacataggaaaagcttgcttttcctgatgacgagtggcggacgggtgagtaagatttgggaagctacctgatagagggggacaacagttggaaacgactgctaataccgcatacagcctgagggtgaaagcagcaatgcgctatcagatgcgcccaaatgggattagctagtaggtgaggtaaaggctcacctaggcgacgatctctagctggtctgagaggatgatcagccacattg

SEQ ID NO: 10596 - DNA, 300 bp, unidentified
  misc_feature 1..300: note = Ascusbbf_154M, encodes 16S rRNA
  source 1..300: mol_type = genomic DNA
agagtttgatcctggctcagattgaacgctggcggcaggcctaatacacgcaagtcgaacggtaacataggaaaagcttgcttttcctgatgacgagtggcggacgggtgagtaaagtttgggaagttacctgatagagggggacaacagttggaaacgactgctaataccgcatacagcctgagggtgaaagcagcaatgcgctatcagatgcgcccaaatgggattagctagtaggtgaggtaaaggctcacctaggcgacgatctctagctggtctgagaggatgatcagccacatt

SEQ ID NO: 10597 - DNA, 225 bp, unidentified
  misc_feature 1..225: note = Ascusbbf_1010A, encodes 16S rRNA
  source 1..225: mol_type = genomic DNA
agagtttgatcatggctcaggacgaacgctggcggcgtgcttaacacatgcaagtcgaacgagacgatttagaagcttgcttttattgagtcgagtggcaaacgggtgagtaacgcgtagacaacctgccgcaaagatggggacaacagtccgaaaggactgctaataccgaatgttgtatctcctccgcatggaagagatattaaagatggcctctacttgtaa

SEQ ID NO: 10598 - DNA, 301 bp, unidentified
  misc_feature 1..301: note = Ascusbbf_1010B, encodes 16S rRNA
  source 1..301: mol_type = genomic DNA
agagtttgatcctggctcaggacgaacgctggcggcgtgcttaacacatgcaagtcgaacgagacgatttagaagcttgcttttattgagtcgagtggcaaacgggtgagtaacgcgtagacaacctgccgcaaagatggggacaacagtccgaaaggactgctaataccgaatgttgtatctcctccgcatggaagagatattaaagatggcctctacttgtaagctatcgctttgcgatgggtctgcgtctgattagctagttggtggggcaacggcctaccaaggcgacgatcagtag

SEQ ID NO: 10599 - DNA, 301 bp, unidentified; identical to SEQ ID NO: 10358
  misc_feature 1..301: note = Ascusbbf_1010C, encodes 16S rRNA
  source 1..301: mol_type = genomic DNA

SEQ ID NO: 10600 - DNA, 301 bp, unidentified
  misc_feature 1..301: note = Ascusbbf_1010D, encodes 16S rRNA
  source 1..301: mol_type = genomic DNA
agagtttgatcctggctcaggacgaacgctggcggcgtgcttaacacatgcaagtcgaacgagacgatttagaagcttgcttttattgagtcgagtggcaaacgggtgagtaacgcgtagacaacctgccgcaaagatggggacaacagtccgaaaggactgctaataccgaatgttgtatctcctccgcatgaaagagatattaaagatggcctctacttgtaagctatcgctttgcgatgggtctgcgtctgattagctagttggtggggcaacggcctaccaaggcgacgatcagtag

SEQ ID NO: 10601 - DNA, 301 bp, unidentified
  misc_feature 1..301: note = Ascusbbf_1010E, encodes 16S rRNA
  source 1..301: mol_type = genomic DNA
agagtttgatcatggctcaggacgaacgctggcggcgtgcttaacacatgcaagtcgaacgagacgaattagaagcttgcttttgacgagtcgagtggcaaacgggtgagtaacgcgtagacaacctgccgcaaagatggggacaacagtccgaaaggactgctaataccgaatgttgtatctcctccgcatggaagagatattaaagatggcctctacttgtaagctatcgctttgcgatgggtctgcgtctgattagctagttggtggggcaacggcctaccaaggcgacgatcagtag

SEQ ID NO: 10602 - DNA, 301 bp, unidentified
  misc_feature 1..301: note = Ascusbbf_1010F, encodes 16S rRNA
  source 1..301: mol_type = genomic DNA
agagtttgatcctggctcagaacgaacgctggcggcaggtcttaggcatgcaagtcgaacgagacgatttagaagcttgcttttattgagtcgagtggcaaacgggtgagtaacgcgtagacaacctgccgcaaagatggggacaacagtccgaaaggactgctaataccgaatgttgtatctcctccgcatggaagagatatcaaagatggcctctacttgtaagctatcgctttgcgatgggtctgcgtctgattagctagttggtggggcaacggcctaccaaggcgacgatcagtag

SEQ ID NO: 10603 - DNA, 301 bp, unidentified; identical to SEQ ID NO: 10522
  misc_feature 1..301: note = Ascusbbf_1010G, encodes 16S rRNA
  source 1..301: mol_type = genomic DNA

SEQ ID NO: 10604 - DNA, 301 bp, unidentified
  misc_feature 1..301: note = Ascusbbf_1010H, encodes 16S rRNA
  source 1..301: mol_type = genomic DNA
agagtttgatcatggctcaggacgaacgctggcggcgtgcttaacacatgcaagtcgaacgagacgatttagaagcttgcttttattgagtcgagtggcaaacgggtgagtaacgcgtagacaacctgccgcaaagatggggacaacagtccgaaaggactgctaataccgaatgttgtgtatcctccgcatggaggacgcattaaagatggcctctacttgtaagctatcgctttgcgatgggtctgcgtctgattagctagttggtggggcaacggcctaccaaggcgacgatcagtag

SEQ ID NO: 10605 - DNA, 301 bp, unidentified; identical to SEQ ID NO: 10494
  misc_feature 1..301: note = Ascusbbf_1010I, encodes 16S rRNA
  source 1..301: mol_type = genomic DNA

SEQ ID NO: 10606 - DNA, 301 bp, unidentified
  misc_feature 1..301: note = Ascusbbf_1010J, encodes 16S rRNA
  source 1..301: mol_type = genomic DNA
agagtttgatcctggctcaggacgaacgctggcggcgtgcttaacacatgcaagtcgaacgagacgaattagaagcttgcttttgacgagtcgagtggcaaacgggtgagtaacgcgtagacaacctgccgcaaagatggggacaacagtccgaaaggactgctaataccgaatgttgtatctcctccgcatggaagagatattaaagatggcctctacttgtaagctatcgctttgcgatgggtctgcgtctgattagctagttggtggggcaacggcctaccaaggcgacgatcagtag

SEQ ID NO: 10607 - DNA, 225 bp, unidentified
  misc_feature 1..225: note = Ascusbbf_5575A, encodes 16S rRNA
  source 1..225: mol_type = genomic DNA
agagtttgatcctggctcaggacgaacgctggcggcgtgcttaacgcatgcaagtcgaacgagaagagatgagaagcttgcttcttatcaattcgagtggcaaacgggcgagtaacgcgtaagcaacctacccttcagatggggacaacagctggaaacggctgctaataccgaatacgttctttttgtcgcatggcagagggaagaaaggaaggctcttcggag

SEQ ID NO: 10608 - DNA, 225 bp, unidentified
  misc_feature 1..225: note = Ascusbbf_5575B, encodes 16S rRNA
  source 1..225: mol_type = genomic DNA
agagtttgatcctggctcaggacgaacgctggcggcgtgcttaacacatgcaagtcgaacgagaagagatgagaagcttgcttcttatcaattcgagtggcaaacgggtgagtaacgcgtaagcaacctgccctctagatggggacaacagctggaaacggctgctaataccgaatacgttttttctgtcgcatggcagagggaagaaagggaggctcttcggag

SEQ ID NO: 10609 - DNA, 300 bp, unidentified
  misc_feature 1..300: note = Ascusbbf_5575C, encodes 16S rRNA
  source 1..300: mol_type = genomic DNA
agagtttgatcctggctcaggacgaacgctggcggcgtgcttaacacatgcaagtcgaacgagaagagatgagaagcttgcttcttattgatttgagtggcaaacgggtgagtaacgcgtaagcaacctgcccttcagatggggacaacagctggaaacggctgctaataccgaatacgttctctctgccgcatgacagagggaagaaagggaggctctttggagctttcgctggaggagggacttgcgtctgattagctagttggaggggtaacggcccaccaaggcgacgatcagtag

SEQ ID NO: 10610 - DNA, 300 bp, unidentified; identical to SEQ ID NO: 10531
  misc_feature 1..300: note = Ascusbbf_5575D, encodes 16S rRNA
  source 1..300: mol_type = genomic DNA

SEQ ID NO: 10611 - DNA, 300 bp, unidentified; identical to SEQ ID NO: 10530
  misc_feature 1..300: note = Ascusbbf_5575E, encodes 16S rRNA
  source 1..300: mol_type = genomic DNA

SEQ ID NO: 10612 - DNA, 300 bp, unidentified; identical to SEQ ID NO: 10525
  misc_feature 1..300: note = Ascusbbf_5575F, encodes 16S rRNA
  source 1..300: mol_type = genomic DNA

SEQ ID NO: 10613 - DNA, 300 bp, unidentified; identical to SEQ ID NO: 10523
  misc_feature 1..300: note = Ascusbbf_5575G, encodes 16S rRNA
  source 1..300: mol_type = genomic DNA

SEQ ID NO: 10614 - DNA, 300 bp, unidentified
  misc_feature 1..300: note = Ascusbbf_5575H, encodes 16S rRNA
  source 1..300: mol_type = genomic DNA
agagtttgatcctggctcaggacgaacgctggcggcgtgcttaacacatgcaagtcgaacgagaagagatgagaagcttgcttcttatcgattcgagtggcaaacgggtgagtaacgcgtaagcaacctgcccttcagatggggacaacagctggaaacggctgctaataccgaatacgttctttttgtcgcatggcagagggaagaaagggaggctcttcggagctttcgctgaaggaggggcttgcgtctgattagctagttggaggggtaacggcccaccaaggcgacgatcagtag

SEQ ID NO: 10615 - DNA, 301 bp, unidentified
  misc_feature 1..301: note = Ascusbbf_775A, encodes 16S rRNA
  source 1..301: mol_type = genomic DNA
agagtttgatcctggctcaggatgaacgctagcgacaggcctaacacatgcaagtcgaggggcagcgcgggagaagcttgcttttcctggcggcgaccggcgcacgggtgcgtaacaggtgtgcaatctgtcctataccggggcatagcccagcgaaagttggattaattctccatgtgagcgagtgccgcatgacacacgcttgaaacgtaagggtatagggtgagcacgcttctgattagatagttggtggggtaacggctcaccaagtcgacgatcagtaggggttctgagaggaagg

SEQ ID NO: 10616 - DNA, 301 bp, unidentified
  misc_feature 1..301: note = Ascusbbf_775B, encodes 16S rRNA
  source 1..301: mol_type = genomic DNA
agagtttgatcatggctcaggatgaacgctagcgacaggcctaacacatgcaagtcgaggggcagcgcgggagaagcttgcttttcctggcggcgaccggcgcacgggtgcgtaacaggtgtgcaatctgtcctataccggggcatagcccagcgaaagttggattaattctccatgtgagcgagtgccgcatgacacacgcttgaaacgtaagggtatagggtgagcacgcttctgattagatagttggtggggtaacggctcaccaagtcgacgatcagtaggggttctgagaggaagg

SEQ ID NO: 10617 - DNA, 300 bp, unidentified
  misc_feature 1..300: note = Ascusbbf_24302A, encodes 16S rRNA
  source 1..300: mol_type = genomic DNA
agagtttgatcatggctcaggacgaacgctggcggcgtgcttaacacatgcaagtcgagcgatgaagctccttcgggagcggattagcggcggacgggtgagtaacacgtgggtaacctgcctcatagaggggaatagcctttcgaaaggaagattaataccgcataagattgtagtgccgcatggcatagcaattaaaggagtaatccgctatgagatggacccgcgtcgcattagctagttggtgaggtaacggctcaccaaggcgacgatgcgtagccgacctgagagggtgatcgg

SEQ ID NO: 10618 - DNA, 300 bp, unidentified
  misc_feature 1..300: note = Ascusbbf_24302B, encodes 16S rRNA
  source 1..300: mol_type = genomic DNA
agagtttgatcctggctcaggacgaacgctggcggcgtgcttaacacatgcaagtcgagcgatgaagttccttcgggagtggattagcggcggacgggtgagtaacacgtgggtaacctgcctcatagaggggaatagcctttcgaaaggaagattaataccgcataagattgtagtgccgcatggtacagcaattaaaggagtaatccgctatgagatggacccgcgtcgcattagctagttggtgaggtaacggctcaccaaggcgacgatgcgtagccgacctgagagggtgatcgg

SEQ ID NO: 10619 - DNA, 301 bp, unidentified
  misc_feature 1..301: note = Ascusbbf_24302C, encodes 16S rRNA
  source 1..301: mol_type = genomic DNA
agagtttgatcatggctcaggatgaacgctggcggcgtgcttaacacatgcaagtcgagcgatgaagctccttcgggagtggattagcggcggacgggtgagtaacacgtgggtaacctgcctcatagaggggaatagccttccgaaaggaagattaataccgcataagattgtagtgccgcatggcatagcaattaaaggagtaatccgctatgagatggacccgcgtcgcattagctagttggtgaggtaacggctcaccaaggcgacgatgcgtagccgacctgagagggtgatcggg

SEQ ID NO: 10620 - DNA, 300 bp, unidentified
  misc_feature 1..300: note = Ascusbbf_24302D, encodes 16S rRNA
  source 1..300: mol_type = genomic DNA
agagtttgatcctggctcaggacgaacgctggcggcgtgcttaacacatgcaagtcgagcgatgaagttccttcgggaatggattagcggcggacgggtgagtaacacgtgggtaacctgcctcgtagaggggaatagccttccgaaaggaagattaataccgcataagattgtagtgccgcatggcatagcaattaaaggagtaatccgctatgagatggacccgcgtcgcattagctagttggtgaggtaacggctcaccaaggcgacgatgcgtagccgacctgagagggtgatcgg

SEQ ID NO: 10621 - DNA, 300 bp, unidentified
  misc_feature 1..300: note = Ascusbbf_24302E, encodes 16S rRNA
  source 1..300: mol_type = genomic DNA
agagtttgatcctggctcaggacgaacgctggcggcgtgcttaacacatgcaagtcgagcgatgaagctccttcgggagtgaattagcggcggacgggtgagtaacacgtgggtaacctgcctcatagaggggaatagcctttcgaaaggaagattaataccgcataagattgtagtaccgcatggtacagcaattaaaggagtaatccgctatgagatggacccgcgtcgcattagctagttggtgaggtaacggctcaccaaggcgacgatgcgtagccgacctgagagggtgatcgg

SEQ ID NO: 10622 - DNA, 300 bp, unidentified
  misc_feature 1..300: note = Ascusbbf_24302F, encodes 16S rRNA
  source 1..300: mol_type = genomic DNA
agagtttgatcctggctcaggacgaacgctggcggcgtgcttaacacatgcaagtcgagcgatgaagttccttcgggaacggattagcggcggacgggtgagtaacacgtgggtaacctgcctcatagaggggaatagcctttcgaaaggaagattaataccgcataagattgtagtgccgcatggcatagcaattaaaggagtaatccgctatgagatggacccgcgtcgcattagctagttggtgaggtaacggctcaccaaggcgacgatgcgtagccgacctgagagggtgatcgg

SEQ ID NO: 10623 - DNA, 300 bp, unidentified
  misc_feature 1..300: note = Ascusbbf_24302G, encodes 16S rRNA
  source 1..300: mol_type = genomic DNA
agagtttgatcctggctcaggacgaacgctggcggcgtgcttaacacatgcaagtcgagcgatgaagctccttcgggagtggattagcggcggacgggtgagtaacacgtgggtaacctgcctcatagaggggaatagcctttcgaaaggaagattaataccgcataagattgtagtgccgcatggcatagcaattaaaggagtaatccgctatgagatggacccgcgtcgcattagctagttggtgaggtaacggctcaccaaggcgacgatgcgtagccgacctgagagggtgatcgg

SEQ ID NO: 10624 - DNA, 300 bp, unidentified
  misc_feature 1..300: note = Ascusbbf_24302H, encodes 16S rRNA
  source 1..300: mol_type = genomic DNA
agagtttgatcctggctcaggacgaacgctggcggcgtgcttaacacatgcaagtcgagcgatgaagcttcttcggaagtggattagcggcggacgggtgagtaacacgtgggtaacctgcctcatagaggggaatagcctttcgaaaggaagattaataccgcataagattgtagtaccgcatggtacagcaattaaaggagtaatccgctatgagatggacccgcgtcgcattagctagttggtgaggtaacggctcaccaaggcgacgatgcgtagccgacctgagagggtgatcgg

SEQ ID NO: 10625 - DNA, 300 bp, unidentified
  misc_feature 1..300: note = Ascusbbf_24302I, encodes 16S rRNA
  source 1..300: mol_type = genomic DNA
agagtttgatcatggctcaggacgaacgctggcggcgtgcttaacacatgcaagtcgagcgatgaagctccttcgggagtggattagcggcggacgggtgagtaacacgtgggtaacctgcctcatagaggggaatagcctttcgaaaggaagattaataccgcataagattgtagtgccgcatggcatagcaattaaaggagtaatccgctatgagatggacccgcgtcgcattagctagttggtgaggtaacggctcaccaaggcgacgatgcgtagccgacctgagagggtgatcgg

SEQ ID NO: 10626 - DNA, 301 bp, unidentified
  misc_feature 1..301: note = Ascusbbf_24302J, encodes 16S rRNA
  source 1..301: mol_type = genomic DNA
agagtttgatcatggctcaggacgaacgctggcggcgtgcttaacacatgcaagtcgagcgagatgaactccttcgggagggactctagcggcggacgggtgagtaacacgtgggtaacctgcctcatagaggggaatagcctttcgaaaggaagattaataccgcataagattgtagtgccgcatggcatagcaattaaaggagtaatccgctatgagatggacccgcgtcgcattagctagttggtgaggtaacggctcaccaaggcgacgatgcgtagccgacctgagagggtgatcg

SEQ ID NO: 10627 - DNA, 301 bp, unidentified
  misc_feature 1..301: note = Ascusbbf_1A, encodes 16S rRNA
  source 1..301: mol_type = genomic DNA
agagtttgatcatggctcagattgaacgctggcggcaggcctaatacatgcaagtcggacggtaacataagaaaagcttgcttttcttgatgacgagtggcggacgggcgagtaagatttgggaagctacctgatagagggggacaacagttggaaacgactgctaataccgcatacagccttagggtgaaagaagaaattcgctatcagatgtgcccaaacgggattagctagtaggtgaggtaaaggctcacctaggcgacgatctctagctggtctgagaggatgatcagccacattg

SEQ ID NO: 10628 - DNA, 301 bp, unidentified
  misc_feature 1..301: note = Ascusbbf_1B, encodes 16S rRNA
  source 1..301: mol_type = genomic DNA
agagtttgatcatggctcagattgaacgctggcggcaggcctaatacatgcaagtcgaacggtaacataagaaaagcttgcttttcttgatgacgagtggcggacgggtgagtaacatttgggaaactacctgatagagggggacaacagttggaaacgactgctaataccgcatacagcctaagggtgaaagaagcaattcgctatcagatgtgcccaaacgggattagctagtaggtgaggtaaaggctcacctaggcgatgatctctagctggtctgagaggatgatcagccacattg

SEQ ID NO: 10629 - DNA, 301 bp, unidentified
  misc_feature 1..301: note = Ascusbbf_1C, encodes 16S rRNA
  source 1..301: mol_type = genomic DNA
agagtttgatcctggctcagattgaacgctggcggcaggcctaatacatgcaagtcgaacggtaacataagaaaagcttgcttttcttgatgacgagtggcggacgggtgagtaagatttgggaaactacctgatagagggggacaacagttggaaacgactgctaataccgcatacagccttagggtgaaagaagaaattcgctatcagatgtgcccaaatgggattagctagtaggtgaggtaaaggctcacctaggcgacgatctctagctggtctgagaggatgatcagccacattg

SEQ ID NO: 10630 - DNA, 301 bp, unidentified; identical to SEQ ID NO: 10592
  misc_feature 1..301: note = Ascusbbf_1D, encodes 16S rRNA
  source 1..301: mol_type = genomic DNA

SEQ ID NO: 10631 - DNA, 300 bp, unidentified
  misc_feature 1..300: note = Ascusbbf_1E, encodes 16S rRNA
  source 1..300: mol_type = genomic DNA
agagtttgatcatggctcagattgaacgctggcggcaggcctaatacatgcaagtcgaacggtaacataaaagaagcttgcttcttttgatgacgagtggcggacgggtgagtaatatttgggaaactacctgatagagggggacaacagttggaaacgactgctaataccgcataaagcctaagggtgaaagcagcaatgcgctatcagatgtgcccaaacgggattagctagtaggtgaggtaaaggctcacctaggcgacgatctctagctggtctgagaggatgatcagccacatt

SEQ ID NO: 10632 - DNA, 301 bp, unidentified
  misc_feature 1..301: note = Ascusbbf_1F, encodes 16S rRNA
  source 1..301: mol_type = genomic DNA
agagtttgatcatggctcagattgaacgctggcggcaggcctaatacatgcaagtcgaacggtaacataagaaaagcttgcttttcttgatgacgagtggcggacgggtgagtaagatttgggaaactacctgatagagggggacaacagttggaaacgactgctaataccgcatacagccttagggtgaaagaagaaattcgctatcagatgtgcccaaatgggattagctagtaggtgaggtagaggctcacctaggcgacgatctctagctggtctgagaggatgatcagccacattg

SEQ ID NO: 10633 - DNA, 301 bp, unidentified
  misc_feature 1..301: note = Ascusbbf_1G, encodes 16S rRNA
  source 1..301: mol_type = genomic DNA
agagtttgatcctggctcagattgaacgctggcggcaggcctaatacatgcaagtcgaacggtaacataagaaaagcttgcttttcttgatgacgagtggcggacgggtgagtaacatttgggaaactacctgatagagggggacaacagttggaaacgactgctaataccgcatacagcctaagggtgaaagaagcaattcgctatcagatgtgcccaaacgggattagctagtaggtgaggtaaaggctcacctaggcgatgatctctagctggtctgagaggatgatcagccacattg

SEQ ID NO: 10634 - DNA, 300 bp, unidentified
  misc_feature 1..300: note = Ascusbbf_1H, encodes 16S rRNA
  source 1..300: mol_type = genomic DNA
agagtttgatcctggctcagattgaacgctggcggcaggcctaatacatgcaagtcgaacggtaacataagaaaagcttgcttttcttgatgacgagtggcggacgggtgagtaacatttgggaaactacctgatagagggggacaacagttggaaacgactgctaataccgcatatagcctaagggtgaaagaagtaattcgctatcagatgtgcccaaacgggattagctagtaggtgaggtaaaggctcacctaggcgatgatctctagctggtctgagaggatgatcagccacatt

SEQ ID NO: 10635 - DNA, 301 bp, unidentified
  misc_feature 1..301: note = Ascusbbf_1I, encodes 16S rRNA
  source 1..301: mol_type = genomic DNA
agagtttgatcctggctcagattgaacgctggcggcaggcctaatacatgcaagtcggacggtaacataagaaaagcttgcttttcttgatgacgagtggcggacgggtgagtaagatttgggaagctacctgatagagggggacaacagttggaaacgactgctaataccgcatacagcctcagggtgaaagaagcgattcgctatcagatgtgcccaaacgggattagctagtaggtgaggtaaaggctcacctaggcgacgatctctagctggtctgagaggatgatcagccacattg

SEQ ID NO: 10636 - DNA, 301 bp, unidentified
  misc_feature 1..301: note = Ascusbbf_1J, encodes 16S rRNA
  source 1..301: mol_type = genomic DNA
agagtttgatcatggctcagattgaacgctggcggcaggcctaatacatgcaagtcgaacggtaacataagaaaagcttgcttttcttgatgacgagtggcggacgggtgagtaacatttgggaaactacctgatagagggggacaacagttggaaacgactgctaataccgcatatagcctaagggtgaaagaagtaattcgctatcagatgtgcccaaacgggattagctagtaggtgaggtaaaggctcacctaggcgatgatctctagctggtctgagaggatgatcagccacattg

SEQ ID NO: 10637 - DNA, 301 bp, unidentified
  misc_feature 1..301: note = Ascusbbf_1K, encodes 16S rRNA
  source 1..301: mol_type = genomic DNA
agagtttgatcctggctcagattgaacgctggcggcaggcctaatacatgcaagtcgaacggtaacataagaaaagcttgcttttcttgatgacgagtggcggacgggtgagtaagatttgggaaactacctgatagagggggacaacagttggaaacgactgctaataccgcatacagccttagggtgaaagaagaaattcgctatcagatgtgcccaaacgggattagctagtaggtgaggtaaaggctcacctaggcgacgatctctagctggtctgagaggatgatcagccacattg

SEQ ID NO: 10638 - DNA, 300 bp, unidentified
  misc_feature 1..300: note = Ascusbbf_52548A, encodes 16S rRNA
  source 1..300: mol_type = genomic DNA
agagtttgatcatggctcaggatgaacgctggcggcgtgcttaacacatgcaagtcgaacgaagcgcattgtttgaattcttcggaaggaagataatgtgactgagtggcggacgggtgagtaacgcgtgggtaacctgccatgtacagggggacaacagttggaaacggctgctaataccgcataagcgcacgagattgcatgatctagtgtgaaaaactccggtggtatatgatggacccgcgtctgattagctagttggtaaggtaacggcttaccaaggcgacgatcagtagccga

SEQ ID NO: 10639 - DNA, 300 bp, unidentified
  misc_feature 1..300: note = Ascusbbf_52548B, encodes 16S rRNA
  source 1..300: mol_type = genomic DNA
agagtttgatcctggctcaggatgaacgctggcggcgtgcttaacacatgcaagtcgaacgaagcgcattgtttgaattcttcggaaggaagataatgtgactgagtggcggacgggtgagtaacgcgtgggtaacctgccatgtacagggggacaacagttggaaacggctgctaataccgcataagcgcacgagattgcatgatctagtgtgaaaaactccggtggtatatgatggacccgcgtctgattagctagttggtaaggtaacggcttaccaaggcgacgatcagtagccga

SEQ ID NO: 10640 - DNA, 300 bp, unidentified
  misc_feature 1..300: note = Ascusbbf_50658A, encodes 16S rRNA
  source 1..300: mol_type = genomic DNA
agagtttgatcatggctcaggacgaacgctggcggcgtgcctaacacatgcaagtcgagcggagacatacagcggataggaagttttcggatggaattgaagaagtatgttttagcggcggacgggtgagtaacgcgtgagcaatctgtccttcacagggggataacacagcgaaagttgtactaataccgcataagaccacggtgttgcatgacacaggggtcaaaggaggaatccggtgaagggtgagctcgcgtccgattagatagtaggtgaggtaacggcccacctagtcgacga

SEQ ID NO: 10641 - DNA, 225 bp, unidentified
  misc_feature 1..225: note = Ascusbbf_850A, encodes 16S rRNA
  source 1..225: mol_type = genomic DNA
agagtttgatcatggctcaggataaacgctggcggcgtgcttaacacatgcaagtcgaacgaggaacagaagacgaggtcttcggattaaattgactgttccgagtggcggacgggtgagtaacgcgtggggaacctgccttatactgagggacaacagctggaaacggctgctaatacctcatatgcgcacaggaaggcatcttccggtgtggaaagaaattcg

SEQ ID NO: 10642 - DNA, 300 bp, unidentified
  misc_feature 1..300: note = Ascusbbf_850B, encodes 16S rRNA
  source 1..300: mol_type = genomic DNA
agagtttgatcctggctcaggataaacgctggcggcgtgcttaacacatgcaagtcgaacgaggaacagaagacgaggtcttcggattaaattgactgttccgagtggcggacgggtgagtaacgcgtggggaacctgccttatactgagggacaacagctggaaacggctgctaatacctcatatgcgcacaggaaggcatcttccggtgtggaaagaaattcggtataagatggccccgcgtctgattaggcagttggtgagataacagcccaccaaaccgacgatcagtagccgacc

SEQ ID NO: 10643 - DNA, 298 bp, unidentified
  misc_feature 1..298: note = Ascusbbf_850C, encodes 16S rRNA
  source 1..298: mol_type = genomic DNA
agagtttgatcatggctcaggataaacgctggcggcgtgcttaacacatgcaagtcgaacgaggaacagaagacgagatcttcggatcaaattgactgttccgagtggcggacgggtgagtaacgcgtggggaacctgccttatactgagggacaacagctggaaacggctgctaatacctcatatgcgcacaggaaggcatcttccggtgtggaaagaaattcggtataagatggccccgcgtctgattaggcagttggtgagataacagcccaccaaaccgacgatcagtagccga

SEQ ID NO: 10644 - DNA, 298 bp, unidentified
  misc_feature 1..298: note = Ascusbbf_850D, encodes 16S rRNA
  source 1..298: mol_type = genomic DNA
agagtttgatcctggctcaggataaacgctggcggcgtgcttaacacatgcaagtcgaacgaggaacagaagatgaggtcttcggattaaattgactgttccgagtggcggacgggtgagtaacgcgtggggaacctgccttatactgagggacaacagctggaaacggctgctaatacctcatatgcgcacaggaaggcatcttccggtgtggaaagaaattcggtataagatggccccgcgtctgattaggcagttggtgagataacagcccaccaaaccgacgatcagtagccga

SEQ ID NO: 10645 - DNA, 298 bp, unidentified
  misc_feature 1..298: note = Ascusbbf_850E, encodes 16S rRNA
  source 1..298: mol_type = genomic DNA
agagtttgatcatggctcaggataaacgctggcggcgtgcttaacacatgcaagtcgaacgaggaacagaagacgaggtcttcggattaaattgactgttccgagtggcggacgggtgagtaacgcgtggggaacctgccttatactgagggacaacagctggaaacggctgctaatacctcatatgcgcacaggaaggcatcttccggtgtggaaagaaattcggtataagatggccccgcgtctgattaggcagttggtgagataacagcccaccaaaccgacgatcagtagccga

SEQ ID NO: 10646 - DNA, 298 bp, unidentified
  misc_feature 1..298: note = Ascusbbf_850F, encodes 16S rRNA
  source 1..298: mol_type = genomic DNA
agagtttgatcatggctcaggataaacgctggcggcgtgcttaacacatgcaagtcgaacgaggaacagaagacgaggtcttcggatcaaattgactgttccgagtggcggacgggtgagtaacgcgtggggaacctgccttatactgagggacaacagctggaaacggctgctaatacctcatatgcgcacaggaaggcatcttccggtgtggaaagaaattcggtataagatggccccgcgtctgattaggcagttggtgagataacagcccaccaaaccgacgatcagtagccga

SEQ ID NO: 10647 - DNA, 298 bp, unidentified
  misc_feature 1..298: note = Ascusbbf_850G, encodes 16S rRNA
  source 1..298: mol_type = genomic DNA
agagtttgatcctggctcaggataaacgctggcggcgtgcttaacacatgcaagtcgaacgaggaacagaagacgaggtcttcggattaaattgactgttccgagtggcggacgggtgagtaacgcgtggggaacctgccttatactgagggacaacagctggaaacggctgctaatacctcatatgcgcacaggaaggcatcttccggtgtggaaagaaattcggtataagatggccccgcgtctgattaggcagttggtgagataacagcccaccaaaccgacgatcagtagccga

SEQ ID NO: 10648 - DNA, 298 bp, unidentified
  misc_feature 1..298: note = Ascusbbf_850H, encodes 16S rRNA
  source 1..298: mol_type = genomic DNA
agagtttgatcctggctcaggataaacgctggcggcgtgcttaacacatgcaagtcgaacgagggacagaagacgagatctttggattaaattgactgtttcgagtggcggacgggtgagtaacgcgtggggaacctgccttatactgagggacaacagctggaaacggctgctaatacctcatatgcgcacaggaaggcatcttccggtgtggaaagaaattcggtataagatggccccgcgtctgattaggcagttggtgagataacagcccaccaaaccgacgatcagtagccga

SEQ ID NO: 10649 - DNA, 298 bp, unidentified
  misc_feature 1..298: note = Ascusbbf_850I, encodes 16S rRNA
  source 1..298: mol_type = genomic DNA
agagtttgatcatggctcaggataaacgctggcggcgtgcttaacacatgcaagtcgaacgagggacagaagacgagatctttggattaaattgactgtttcgagtggcggacgggtgagtaacgcgtggggaacctgccttatactgagggacaacagctggaaacggctgctaatacctcatatgcgcacaggaaggcatcttccggtgtggaaagaaattcggtataagatggccccgcgtctgattaggcagttggtgagataacagcccaccaaaccgacgatcagtagccga

SEQ ID NO: 10650 - DNA, 300 bp, unidentified
  misc_feature 1..300: note = Ascusbbf_850J, encodes 16S rRNA
  source 1..300: mol_type = genomic DNA
agagtttgatcatggctcaggataaacgctggcggcgtgcttaacacatgcaagtcgaacgaggaacagaagacgaggtcttcggattaaattgactgttccgagtggcggacgggtgagtaacgcgtggggaacctgccttatactgagggacaacagctggaaacggctgctaatacctcatatgcgcacaggaaggcatcttccggtgtggaaagaaattcggtataagatggccccgcgtctgattaggcagttggtgagataacagcccaccaaaccgacgatcagtagccgacc

SEQ ID NO: 10651 - DNA, 225 bp, unidentified
  misc_feature 1..225: note = Ascusbbf_4A, encodes 16S rRNA
  source 1..225: mol_type = genomic DNA
agagtttgatcatggctcaggatgaacgctagctacaggcttaacacatgcaagtcgaggggaaacgacagagagtgcttgcactttttgggcgtcgaccggcgaatgggtgagtaacgcgtatccaacctgcccttgactgagggatagtccagtgaaaactgaattaatacctcatgttctcctcagacggcatcagacgaggagcaaagattaatcggtcaa

SEQ ID NO: 10652 - DNA, 301 bp, unidentified
  misc_feature 1..301: note = Ascusbbf_4B, encodes 16S rRNA
  source 1..301: mol_type = genomic DNA
agagtttgatcctggctcaggatgaacgctagctacaggcttaacacatgcaagtcgaggggaaacgacagagagtgcttgcactttttgggcgtcgaccggcgaatgggtgagtaacgcgtatccaacctgcctttgactgagggatagcccagtgaaaactgaattaatacctcatgttctcctcagacggcatcagacgaggagcaaagattaatcggtcaaggatggggatgcgtctgattaggtagtaggcggggtaacggcccacctagccgacgatcagtaggggttctgagag

SEQ ID NO: 10653 - DNA, 301 bp, unidentified
  misc_feature 1..301: note = Ascusbbf_4C, encodes 16S rRNA
  source 1..301: mol_type = genomic DNA
agagtttgatcctggctcaggatgaacgctagctacaggcttaacacatgcaagtcgaggggaaacgacatagagtgcttgcactttatgggcgtcgaccggcgaatgggtgagtaacgcgtatccaacctgcccttgactgagggatagcccagtgaaaactgaattaatacctcatgttctcctcagacggcatcagacgaggagcaaagattaatcggtcaaggatggggatgcgtctgattaggtagtaggcggggtaacggcccacctagccgacgatcagtaggggttctgagag

SEQ ID NO: 10654 - DNA, 301 bp, unidentified
  misc_feature 1..301: note = Ascusbbf_4D, encodes 16S rRNA
  source 1..301: mol_type = genomic DNA
agagtttgatcctggctcaggatgaacgctagctacaggcttaacacatgcaagtcgaggggaaacgacagagagtgcttgcactttttgggcgtcgaccggcgaatgggtgagtaacgcgtatccaacctgcccttgactgagggatagcccagtgaaaactgaattaatacctcatgttctcctcagacggcatcagacgaggagcaaagattaatcggtcaaggatggggatgcgtctgattaggtagtaggcggggtaacggcccacctagccgacgatcagtaggggttctgagag

SEQ ID NO: 10655 - DNA, 301 bp, unidentified
  misc_feature 1..301: note = Ascusbbf_4E, encodes 16S rRNA
  source 1..301: mol_type = genomic DNA
agagtttgatcatggctcaggatgaacgctagccacaggcttaacacatgcaagtcgaggggaaacgacagagagtgcttgcactttttgggcgtcgaccggcgaatgggtgagtaacgcgtatccaacctgcctttgactgagggatagcccagtgaaaactgaattaatacctcatgttctcctcagacggcatcagacgaggagcaaagattaatcggtcaaggatggggatgcgtctgattaggtagtaggcggggtaacggcccacctagccgacgatcagtaggggttctgagag

SEQ ID NO: 10656 - DNA, 301 bp, unidentified; identical to SEQ ID NO: 10522
  misc_feature 1..301: note = Ascusbbf_4F, encodes 16S rRNA
  source 1..301: mol_type = genomic DNA

SEQ ID NO: 10657 - DNA, 301 bp, unidentified
  misc_feature 1..301: note = Ascusbbf_4G, encodes 16S rRNA
  source 1..301: mol_type = genomic DNA
agagtttgatcctggctcaggatgaacgctagctacaggcttaacacatgcaagtcgaggggaaacgacagagagtgcttgcactttttgggcgtcgaccggcgaatgggtgagtaacgcgtatccaacctgcccttgactgagggatagcccagtgaaaactgaattaatacctcatatcctcctccgacggcatcagacgaggagtaaagatttatcggtcaaggatggggatgcgtctgattaggtagtaggcggggtaacggcccacctagccgacgatcagtaggggttctgagag

SEQ ID NO: 10658 - DNA, 301 bp, unidentified
  misc_feature 1..301: note = Ascusbbf_4H, encodes 16S rRNA
  source 1..301: mol_type = genomic DNA
agagtttgatcctggctcaggatgaacgctagctacaggcttaacacatgcaagtcgaggggaaacgacatagagtgcttgcactttatgggcgtcgaccggcgaatgggtgagtaacgcgtatccaacctgcccttgactgagggatagcccagtggaaactgaattaatacctcatgttctcctcagacggcatcagacgaggagcaaagattaatcggtcaaggatggggatgcgtctgattaggtagtaggcggggtaacggcccacctagccgacgatcagtaggggttctgagag

SEQ ID NO: 10659 - DNA, 301 bp, unidentified
  misc_feature 1..301: note = Ascusbbf_4I, encodes 16S rRNA
  source 1..301: mol_type = genomic DNA
agagtttgatcctggctcaggatgaacgctagctacaggcttaacacatgcaagtcgaggggaaacgacagagagtgcttgcacactttgggcgtcgaccggcgaatgggtgagtaacgcgtatccaacctgcccttgactgagggatagcccagtgaaaactgaattaatacctcatgttctcctccgacggcatcagacgaggagtaaagattaatcggtcaaggatggggatgcgtctgattaggtagtaggcggggtaacggcccacctagccgacgatcagtaggggttctgagag

SEQ ID NO: 10660 - DNA, 301 bp, unidentified
  misc_feature 1..301: note = Ascusbbf_4J, encodes 16S rRNA
  source 1..301: mol_type = genomic DNA
agagtttgatcctggctcaggatgaacgctagctacaggcttaacacatgcaagtcgaggggaaacgacaaagagtgcttgcacactttgggcgtcgaccggcgaatgggtgagtaacgcgtatccaacctgcccttgactgagggatagcccagtgaaaactgaattaatacctcatgtcctcctccgacggcatcagacgaggagtaaagatttatcggtcaaggatggggatgcgtctgattaggtagtaggcggggtaacggcccacctagccgacgatcagtaggggttctgagag

SEQ ID NO: 10661 - DNA, 301 bp, unidentified
  misc_feature 1..301: note = Ascusbbf_4K, encodes 16S rRNA
  source 1..301: mol_type = genomic DNA
agagtttgatcctggctcaggatgaacgctagctacaggcttaacacatgcaagtcgaggggaaacgacatagagtgcttgcactttatgggcgtcgaccggcgaatgggtgagtaacgcgtatccaacctgcccttgaccgagggatagcccagtgaaaactgaattaatacctcatgttctcctcagacggcatcagacgaggagcaaagattaatcggtcaaggatggggatgcgtctgattaggtagtaggcggggtaacggcccacctagccgacgatcagtaggggttctgagag

SEQ ID NO: 10662 - DNA, 300 bp, unidentified
  misc_feature 1..300: note = Ascusbbf_5131A, encodes 16S rRNA
  source 1..300: mol_type = genomic DNA
agagtttgatcctggctcaggatgaacgctagctacaggcttaacacatgcaagtcgaggggcagcattaagtcagcttgctgatttagatggcgaccggcgcacgggtgagtaacgcgtatccaacctgccccctacccggggatagccttgcgaaagtaagattaatacccggtgctgttatgattccgcatgggaatataacgaaagattcatcggtaggggatggggatgcgtccgattagcttgttggcggggtaacggcccaccaaggcgacgatcggtaggggttctgagagg

SEQ ID NO: 10663 - DNA, 300 bp, unidentified
  misc_feature 1..300: note = Ascusbbf_5131B, encodes 16S rRNA
  source 1..300: mol_type = genomic DNA
agagtttgatcatggctcaggatgaacgctggcggcgtgcttaacacatgcaagtcgaacgaagcaacttattacgatcccttcggggtgacgatttgttgactgagtggcggacgggtgagtaacgcgtgggtaacctaccttgtacagggggacaacagttggaaacgactgctaataccgcataagcgcacagcttcgcatgaagcagtgtgaaaagttttttcggtacaagatggacccgcgtctgattagctagttggtgaggtaacggcccaccaaggcgacgatcagtagccg

SEQ ID NO: 10664 - DNA, 300 bp, unidentified
  misc_feature 1..300: note = Ascusbbf_5131C, encodes 16S rRNA
  source 1..300: mol_type = genomic DNA
agagtttgatcatggctcaggatgaacgctagctacaggcttaacacatgcaagtcgaggggcagcattaagtcagcttgctgatttagatggcgaccggcgcacgggtgagtaacgcgtatccaacctgccccctacccggggatagccttgcgaaagtaagattaatacccggtgctgttatgattccgcatgggaatataacgaaagattcatcggtaggggatggggatgcgtccgattagcttgttggcggggtaacggcccaccaaggcgacgatcggtagggggtctgagagg

SEQ ID NO: 10665 - DNA, 300 bp, unidentified
  misc_feature 1..300: note = Ascusbbf_5131D, encodes 16S rRNA
  source 1..300: mol_type = genomic DNA
agagtttgatcatggctcaggatgaacgctagctacaggcttaacacatgcaagtcgaggggcagcattagattagcttgctaatctagatggcgaccggcgcacgggtgagtaacgcgtatccaacctgccccctacccggggatagccttgcgaaagtaagattaatacccggtgctgttatgcttccgcatgggaatataacgaaagattcatcggtaggggatggggatgcgtccgattagcttgttggcggggtaacggcccaccaaggcgacgatcggtaggggttctgagagg

SEQ ID NO: 10666 - DNA, 300 bp, unidentified
  misc_feature 1..300: note = Ascusbbf_5131E, encodes 16S rRNA
  source 1..300: mol_type = genomic DNA
agagtttgatcctggctcaggatgaacgctagctacaggcttaacacatgcaagtcgaggggcagcattaagtcagcttgctgatttagatggcgaccggcgcacgggtgagtaacgcgtatccaacctgccccctacccggggatagccttgcgaaagtaagattaatacccggtgcagttatgattccgcatgggaatataacgaaagattcatcggtaggggatggggatgcgtccgattagcttgttggcggggtaacggcccaccaaggcgacgatcggtaggggttctgagagg

SEQ ID NO: 10667 - DNA, 300 bp, unidentified; identical to SEQ ID NO: 10663
  misc_feature 1..300: note = Ascusbbf_5131F, encodes 16S rRNA
  source 1..300: mol_type = genomic DNA

SEQ ID NO: 10668 - DNA, 300 bp, unidentified
  misc_feature 1..300: note = Ascusbbf_5131G, encodes 16S rRNA
  source 1..300: mol_type = genomic DNA
agagtttgatcctggctcaggatgaacgctagctacaggcttaacacatgcaagtcgaggggcagcattaaggaagcttgctttcttagatggcgaccggcgcacgggtgagtaacgcgtatccaacctgccccctacccggggatagccttgcgaaagtaagattaatacccggtgcagttatgattccgcatgggaatataacgaaagattcatcggtaggggatggggatgcgtccgattagcttgttggcggggtaacggcccaccaaggcgacgatcggtaggggttctgagagg

SEQ ID NO: 10669 - DNA, 300 bp, unidentified
  misc_feature 1..300: note = Ascusbbf_5131H, encodes 16S rRNA
  source 1..300: mol_type = genomic DNA
agagtttgatcatggctcaggatgaacgctagctacaggcttaacacatgcaagtcgaggggcagcattaagtcagcttgctgatttagatggcgaccggcgcacgggtgagtaacgcgtatccaacctgccccctacccggggatagccttgcgaaagtaagattaatacccggtgctgttatgattccgcatgggaatataacgaaagattcatcggtaggggatggggatgcgtccgattagcttgttggcggggtaacggcccaccaaggcgacgatcggtaggggttctgagagg

SEQ ID NO: 10670 - DNA, 300 bp, unidentified
  misc_feature 1..300: note = Ascusbbf_8600A, encodes 16S rRNA
  source 1..300: mol_type = genomic DNA
agagtttgatcctggctcaggacgaacgctggcggcgtgcctaacacatgcaagtcgaacggagctagaaagcttgctttttagcttagtggcggacgggtgagtaatgcgtgagcaacctgcctgtcagtgggggataacttccggaaacggacgctaataccgcatatagtacataatccgcatggataagtgtatgaaaggagcaatccgctgatagatgggctcacgtccgattagtttgttggtggggtaatggcctaccaagactgcgatcggtagccgggctgagaggctgaa

SEQ ID NO: 10671 - DNA, 300 bp, unidentified
  misc_feature 1..300: note = Ascusbbf_8600B, encodes 16S rRNA
  source 1..300: mol_type = genomic DNA
agagtttgatcatggctcaggacgaacgctggcggcgtgcctaacacatgcaagtcgaacggagctagaaagcttgctttttagcttagtggcggacgggtgagtaatgcgtgagcaacctgcctgtcagtgggggataacttccggaaacggacgctaataccgcatatagtacataatccgcatggataagtgtatgaaaggagcaatccgctgatagatgggctcacgtccgattagtttgttggtggggtaatggcctaccaagactgcgatcggtagccgggctgagaggctgaa

SEQ ID NO: 10672 - DNA, 299 bp, unidentified
  misc_feature 1..299: note = Ascusbbf_1273A, encodes 16S rRNA
  source 1..299: mol_type = genomic DNA
agagtttgatcatggctcaggatgaacgctggcggcgtgcttaacacatgcaagttgtgcggtttctttcgaatgagacttcggtggattttggaagagatagcagcggacgggtgagtaaagcacaaggacgtgccctgaggcgggggacaactacgggaaaccgtagctaataccccgtaagccgagaggtgaaagcagcaatgcgccgaaggagcgacttgtgtcctatcaggtagttggtgaggcaacggctcaccaagccgaagacgggtagccggactgagaggttgtacggc

SEQ ID NO: 10673 - DNA, 299 bp, unidentified
  misc_feature 1..299: note = Ascusbbf_1273B, encodes 16S rRNA
  source 1..299: mol_type = genomic DNA
agagtttgatcatggctcaggatgaacgctggcggcgtgcttaacacatgcaagttgtgcggtttctttcaaatgagacttcggtggattttggaagagatagcagcggacgggtgagtaaagcacaaggacgtgccctgaggcgggggacaactacgggaaaccgtagctaataccccgtaagccgagaggtgaaagcagcaatgcgccgaaggagcgacttgtgtcctatcaggtagttggtgaggcaacggctcaccaagccgaagacgggtagccggactgagaagttgtacggc

SEQ ID NO: 10674 - DNA, 299 bp, unidentified
  misc_feature 1..299: note = Ascusbbf_1273C, encodes 16S rRNA
  source 1..299: mol_type = genomic DNA
agagtttgatcctggctcaggatgaacgctggcggcgtgcttaacacatgcaagttgtgcggtttctttcgaatgagacttcggtggattttggaagagatagcagcggacgggtgagtaaagcacaaggacgtgccctgaggcgggggacaactacgggaaaccgtagctaataccccgtaagccgagaggtgaaagcagcaatgcgccgaaggagcgacttgtgtcctatcaggtagttggtgaggcaacggctcaccaagccgaagacgggtagccggactgagaggttgtacggc

SEQ ID NO: 10675 - DNA, 299 bp, unidentified
  misc_feature 1..299: note = Ascusbbf_1273D, encodes 16S rRNA
  source 1..299: mol_type = genomic DNA
agagtttgatcatggctcaggatgaacgctggcggcgtgcttaacacatgcaagttgggcggtttctttcgaatgagacttcggtggattttggaagagatagcagcggacgggtgagtaaagcacaaggacgtgccctgaggcgggggacaactacgggaaaccgtagctaataccccgtaagccgagaggtgaaagcagcaatgcgccgaaggagcgacttgtgtcctatcaggtagttggtgaggcaacggctcaccaagccgaagacgggtagccggactgagaggttgtacggc

SEQ ID NO: 10676 - DNA, 300 bp, unidentified
  misc_feature 1..300: note = Ascusbbf_39159A, encodes 16S rRNA
  source 1..300: mol_type = genomic DNA
agagtttgatcctggctcaggacgaacgctggcggcacgcttaacacatgcaagtcgaacggagataatttgagtttacttagattatcttagtggcggacgggtgagtaacacgtgagcaacctacctttgagagagggatagcttctggaaacggatggtaatacctcataacgtagttttaccgcatgataggactaccaaagatttatcactcaaagatgggctcgcgtctgattagctagatggtgaggtaacggctcaccatggcgacgatcagtagccggactgagaggttga

SEQ ID NO: 10677 - DNA, 300 bp, unidentified
  misc_feature 1..300: note = Ascusbbf_39159B, encodes 16S rRNA
  source 1..300: mol_type = genomic DNA
agagtttgatcatggctcaggacgaacgctggcggcacgcttaacacatgcaagtcgaacggagataatttgagtttacttagattatcttagtggcggacgggtgagtaacacgtgagcaacctacctttgagagagggatagcttctggaaacggatggtaatacctcataacgtagttttaccgcatgataggactaccaaagatttatcactcaaagatgggctcgcgtctgattagctagatggtgaggtaacggctcaccatggcgacgatcagtagccggactgagaggttga

SEQ ID NO: 10678 - DNA, 301 bp, unidentified
  misc_feature 1..301: note = Ascusbbf_39159C, encodes 16S rRNA
  source 1..301: mol_type = genomic DNA
agagtttgatcctggctcaggacgaacgctggcggcacgcttaacacatgcaagtcgaacggagataatttgagtttacttggattatcttagtggcggacgggtgagtaacacgtgagcaacctgcctttgagagagggatagcttctggaaacggatggtaatacctcataacgtagttttaccgcatgataggactaccaaagatttatcactcaaagatgggctcgcgtctgattagatagttggtgaggtaacggctcaccaagtcgacgatcagtagccggactgagaggttgaa

SEQ ID NO: 10679 - DNA, 300 bp, unidentified
  misc_feature 1..300: note = Ascusbbf_39159D, encodes 16S rRNA
  source 1..300: mol_type = genomic DNA
agagtttgatcctggctcaggacgaacgctggcggcacgcttaacacatgcaagtcgaacggagataatttgagtttacttagattatcttagtggcggacgggtgagtaacacgtgagcaacctacctttgagagagggatagcttctggaaacggatggtaatacctcataacgtagttttaccgcatgataggactaccaaagatttatcactcaaagatgggctcgcgtctgattagctagatggtgaggtaacggctcaccatggcgacgatcagtagccgaactgagaggttga

SEQ ID NO: 10680 - DNA, 300 bp, unidentified
  misc_feature 1..300: note = Ascusbbf_318A, encodes 16S rRNA
  source 1..300: mol_type = genomic DNA
agagtttgatcctggctcagattgaacgctggcggcaggcttaatacatgcaagtcgaacggtaacggcaggaagcttgcttcctggctgacgagtggcggacgggtgagtaatacctggggagctgcctgaatgagggggacaacacctggaaacgggtgctaataccgcgtaagccctgagggggaaaggccgggcaaccggtcgcattcagatgcgcccaggtgggattagctagttggtggggtaacggcctaccaaggcgacgatctctagctggtctgagaggatgatcagcca

SEQ ID NO: 10681 - DNA, 300 bp, unidentified
  misc_feature 1..300: note = Ascusbbf_318B, encodes 16S rRNA
  source 1..300: mol_type = genomic DNA
agagtttgatcctggctcagattgaacgctggcggcaggcttaatacatgcaagtcgaacggtaacggcaggaagcttgcttcctggctgacgagtggcagacgggtgagtaatacctggggagctgcctgaatgagggggacaacacctggaaacgggtgctaataccgcataagccctgagggggaaaggccgggcaaccggtcgcattcagatgcgcccaggtgggattagctagttggtggggtaacggcctaccaaggcgacgatctctagctggtctgagaggatgatcagcca

SEQ ID NO: 10682 - DNA, 300 bp, unidentified
  misc_feature 1..300: note = Ascusbbf_318C, encodes 16S rRNA
  source 1..300: mol_type = genomic DNA
agagtttgatcatggctcagattgaacgctggcggcaggcttaatacatgcaagtcgaacggtaacggcaggaagcttgcttcctggctgacgagtggcggacgggtgagtaatacctggggagctgcctgaatgagggggacaacacctggaaacgggtgctaataccgcgtaagccctgagggggaaaggccgggcaaccggtcgcattcagatgcgcccaggtgggattagctagttggtggggtaacggcctaccaaggcgacgatctctagctggtctgagaggatgatcagcca

SEQ ID NO: 10683 - DNA, 300 bp, unidentified; identical to SEQ ID NO: 10495
  misc_feature 1..300: note = Ascusbbf_318D, encodes 16S rRNA
  source 1..300: mol_type = genomic DNA

SEQ ID NO: 10684 - DNA, 300 bp, unidentified
  misc_feature 1..300: note = Ascusbbf_318E, encodes 16S rRNA
  source 1..300: mol_type = genomic DNA
agagtttgatcatggctcagattgaacgctggcggcaggcttaatacatgcaagtcgaacggtaacagcaggaagcttgcttcctggctgacgagtggcggacgggtgagtaatacctggggagctgcctgaatgagggggacaacacctggaaacgggtgctaataccgcgtaagccctgagggggaaaggctgggcaaccagtcgcattcagatgcgcccaggtgggattagctagttggtggggtaacggcctaccaaggcgacgatctctagctggtctgagaggatgatcagcca

SEQ ID NO: 10685 - DNA, 300 bp, unidentified
  misc_feature 1..300: note = Ascusbbf_7046A, encodes 16S rRNA
  source 1..300: mol_type = genomic DNA
agagtttgatcatggctcaggacgaacgctggcggcgtgcttaacacatgcaagtcgagcggtaaggccccttcgggggtacacgagcggcgaacgggtgagtaacacgtgagtaacctgcccctgactctgggataagcctgggaaactgggtctaataccggatatgacctcgtgccgcatggtgtggggtggaaaggtgtttttccggtcagggatgggctcgcggcctatcagcttgttggtggggtaacggcctaccaaggcgatgacgggtagccggcctgagagggcgaccgg

SEQ ID NO: 10686 - DNA, 266 bp, unidentified
  misc_feature 1..266: note = Ascusbbf_1372985A, encodes 16S rRNA
  source 1..266: mol_type = genomic DNA
agagtttgatcatggctcaggatgaacgctagcggcaggcttaacacatgcaagtcgaggggcatcgcggggtagcaataccctggcggcgaccggcgaaagggtgcgtaacgcgtgagcgacatgcccgtcacagggggataaccggcggaaacgccgcctaataccccatatgaggccaggccacatggccgggccttgaaagtcaaggcggtgacggattggctcgcgtccgattagccagttggcggggcaacggcccacca

SEQ ID NO: 10687 - DNA, 300 bp, unidentified; identical to SEQ ID NO: 10362
  misc_feature 1..300: note = Ascusbbf_1372985B, encodes 16S rRNA
  source 1..300: mol_type = genomic DNA

SEQ ID NO: 10688 - DNA, 261 bp, unidentified
  misc_feature 1..261: note = Ascusbbf_1372985C, encodes 16S rRNA
  source 1..261: mol_type = genomic DNA
agagtttgatcctggctcaggatgaacgctagctacaggcttaacacatgcaagtcgaggggcatcgcggggtagcaataccctggcggcgaccggcgaaagggtgcgtaacgcgtgagcgacatgcccgtcacagggggataaccggcggaaacgccgcctaataccccatatgaggccaggccacatggctgggtcttgaaagtcaaggcggtgacggattggctcgcgtccgattagccagttggcggggcaacggcc

SEQ ID NO: 10689 - DNA, 299 bp, unidentified
  misc_feature 1..299: note = Ascusbbf_1372985D, encodes 16S rRNA
  source 1..299: mol_type = genomic DNA
agagtttgatcctggctcaggatgaacgctagcggcaggcttaacacatgcaagtcgaggggcatcgcggggtagcaataccctggcggcgaccggcgaaagggtgcgtaacgcgtgagcgacatgcccgtcacagggggataaccggcggaaacgccgcctaataccccatatgaggccaggccacatggctgggtcttgaaagtcaaggcggtgacggattggctcgcgtccgattagccagttggcggggcaacggcccaccaaggcgacgatcggtaggggttctgagaggaagg

SEQ ID NO: 10690 - DNA, 299 bp, unidentified
  misc_feature 1..299: note = Ascusbbf_1372985E, encodes 16S rRNA
  source 1..299: mol_type = genomic DNA
agagtttgatcatggctcaggatgaacgctagcggcaggcttaacacatgcaagtcgaggggcatcgcggggtagcaataccctggcggcgaccggcgaaagggtgcgtaacgcgtgagcgacatgcccgtcacagggggataaccggcggaaacgccgcctaataccccatatgaggccaggccacatggctgggtcttgaaagtcaaggcggtgacggattggctcgcgtccgattagccagttggcggggcaacggcccaccaaggcgacgatcggtaggggttctgagaggaagg

SEQ ID NO: 10691 - DNA, 299 bp, unidentified
  misc_feature 1..299: note = Ascusbbf_1372985F, encodes 16S rRNA
  source 1..299: mol_type = genomic DNA
agagtttgatcctggctcaggatgaacgctagcggcaggcttaacacatgcaagtcgaggggcatcgcggggtagcaataccctggcggcgaccggcgaaagggtgcgtaacgcgtgagcgacatgcccgtcacagggggataaccggcggaaacgccgcctaataccccatatgaggccaggccacatggctgggtcttgaaagtcaaggcggcgacggattggctcgcgtccgattagccagttggcggggcaacggcccaccaaggcgacgatcggtaggggttctgagaggaagg

SEQ ID NO: 10692 - DNA, 261 bp, unidentified
  misc_feature 1..261: note = Ascusbbf_1372985I, encodes 16S rRNA
  source 1..261: mol_type = genomic DNA
agagtttgatcatggctcaggatgaacgctagcggcaggcttaacacatgcaagtcgaggggcatcgcggggtagcaataccctggcggcgaccggcgaaagggtgcgtaacgcgtgagcgacatgcccgtcacagggggataaccggcggaaacgccgcctaataccccatatgaggccaggccacatggccgggccttgaaagtcaaggcggtgacggattggctcgcgtccgattagccagttggcgggggaacggcc

SEQ ID NO: 10693 - DNA, 301 bp, unidentified
  misc_feature 1..301: note = Ascusbbf_1372985L, encodes 16S rRNA
  source 1..301: mol_type = genomic DNA
agagtttgatcatggctcagattgaacgctggcggcaggcctaatacatgcaagtcggacggtaacataagaaaagcttgcttttcttgatgacgagtggcggacgggtgagtaagatttgggaaactacctgatagagggggacaacagttggaaacgactgctaataccgcatacaacctcagggtgaaagaagaaattcgctatcagatgtgcccaaacgggattagctagtaggtgaggtaaaggctcacctaggcgacgatctctagctggtctgagaggatgatcagccacattg

SEQ ID NO: 10694 - DNA, 269 bp, unidentified
  misc_feature 1..269: note = Ascusbbf_1372985M, encodes 16S rRNA
  source 1..269: mol_type = genomic DNA
agagtttgatcctggctcaggatgaacgctagcggcaggcttaacacatgcaagtcgaggggcatcgcggggtagcaataccctggcggcgaccggcgaaagggtgcgtaacgcgtgagcgacatgcccgtcacagggggataaccggcggaaacgccgcctaataccccatatgaggccaggccacatggctgggtcttgaaagtcaaggcggtgacggattggctcgcgtccgattagccagttggcggggcaacggcccacccagg

SEQ ID NO: 10695 - DNA, 253 bp, unidentified
  misc_feature 1..253: note = Ascusbbf_1372985N, encodes 16S rRNA
  source 1..253: mol_type = genomic DNA
agagtttgatcctggctcaggatgaacgctagcggcaggcttaacacatgcaagtcgaggggcatcgcggggtagcaataccctggcggcgaccggcgaaagggtgcgtaacgcgtgagcgacatgcccgtcacagggggataaccggcggaaacgccgcctaataccccatatgaggccaggccacatggccgggccttgaaagtcaaggcggtgacggattggctcgcggccggttagccaggtggcgggg

SEQ ID NO: 10696 - DNA, 264 bp, unidentified
  misc_feature 1..264: note = Ascusbbf_1372985O, encodes 16S rRNA
  source 1..264: mol_type = genomic DNA
agagtttgatcatggctcaggatgaacgctagcggcaggcttaacacatgcaagtcgaggggcatcgcggggtagcaataccctggcggcgaccggcgaaagggtgcgtaacgcgtgagcgacatgcccgtcacagggggataaccggcggaaacgccgcctaataccccatatgaggccaggccacatggctgggtcttgaaagtcaaggcggtgacggattggctcgcgtccgattagccagttggcgggggaacggcccac

SEQ ID NO: 10697 - DNA, 253 bp, unidentified
  misc_feature 1..253: note = Ascusbbf_1372985P, encodes 16S rRNA
  source 1..253: mol_type = genomic DNA
agagtttgatcctggctcaggatgaacgctagcggcaggcttaacacatgcaagtcgaggggcatcgcggggtagcaataccctggcggcgaccggcgaaagggtgcgtaacgcgtgagcgacatgcccgtcacagggggataaccggcggaaacgccgcctaataccccatatgaggccaggccacatggccgggccttgaaagtcaaggcggtgacggatttgctcgcgtccgattagccagttggcgggg

SEQ ID NO: 10698 - DNA, 266 bp, unidentified
  misc_feature 1..266: note = Ascusbbf_1372985Q, encodes 16S rRNA
  source 1..266: mol_type = genomic DNA
agagtttgatcctggctcaggatgaacgctagcggcaggcttaacacatgcaagtcgaggggcatcgcggggtagcaataccctggcggcgaccggcgaaagggtgcgtaacgcgtgagcgacatgcccgtcacagggggataaccggcggaaacgccgcctaataccccatatgaggccaggccacatggccgggccttgaaagtcaaggcggtgacggattggctcgcgtccgattagcccgttggcggggcaacggcccacca

SEQ ID NO: 10699 - DNA, 253 bp, unidentified
  misc_feature 1..253: note = Ascusbbf_1372985R, encodes 16S rRNA
  source 1..253: mol_type = genomic DNA
agagtttgatcctggctcaggatgaacgctagcggcaggcttaacacatgcaagtcgaggggcatcgcggggtagcaataccctggcggcgaccggcgaaagggtgcgtaacgcgtgagcgacatgcccgtcacagggggataaccggcggaaacgccgcctaataccccatatgaggccaggccacatggccgggccttgaaagtcaaggcggtgacggattggctcgcggccgattagccagtttgcgggg

SEQ ID NO: 10700 - DNA, 299 bp, unidentified
  misc_feature 1..299: note = Ascusbbf_1372985S, encodes 16S rRNA
  source 1..299: mol_type = genomic DNA
agagtttgatcatggctcaggatgaacgctagcggcaggcttaacacatgcaagtcgaggggcatcgcggggtagcaataccctggcggcgaccggcgaaagggtgcgtaacgcgtgagcgacatgcccgtcacagggggataaccggcggaaacgccgcctaataccccatatgaggccaggccacatggccgggccttgaaagtcaaggcggtgacggattggctcgcgtccgattagccagttggcggggcaacggcccaccaaggcgacgatcggtaggggttctgagaggaagg

SEQ ID NO: 10701 - DNA, 299 bp, unidentified
  misc_feature 1..299: note = Ascusbbf_1372985T, encodes 16S rRNA
  source 1..299: mol_type = genomic DNA
agagtttgatcctggctcaggatgaacgctagcggcaggcttaacacatgcaagtcgaggggcatcgcggggtagcaataccctggcggcgaccggcgaaagggtgcgtaacgcgtgagcgacatgcccgtcacagggggataaccggcggaaacgccgcctaataccccatatgaggccaggccacatggccgggccttgaaagtcaaggcggtgacggattggctcgcgtccgattagccagttggcggggcaacggcccaccaaggcgacgatcggtaggggttctgagaggaagg

SEQ ID NO: 10702 - DNA, 301 bp, unidentified
  misc_feature 1..301: note = Ascusbbf_121971A, encodes 16S rRNA
  source 1..301: mol_type = genomic DNA
agagtttgatcatggctcaggatgaacgctagcggcaggcttaacacatgcaagtcgaggggcaacgcggtgtagcaatacactggcggcgaccggcggaagggtgcgtaacgcgtgagcaacatgcccgtcacagggggataatccatggaaacgtggtctaacaccgcatagattatagggaggacatcctctttataagaaattcgcaagaaggtgacggattggctcgcgtaacattagccagttggtagggtaacggcctaccaaagcgacgatgtttaggggtcctgagagggag

SEQ ID NO: 10703 - DNA, 300 bp, unidentified
  misc_feature 1..300: note = Ascusbbf_5251A, encodes 16S rRNA
  source 1..300: mol_type = genomic DNA
agagtttgatcatggctcagaacgaacgctggcggcgcgtcttaagcatgcaagtcgagcggtaagattggtgcttgcactaatcctagagcggcggactggtgagtaacgcgtgggtgacgtacctctgtgacggggacagctcctagaaataggagataataccggatacgctgcatgttgtcagaggacatgcaggaaaggatcttttgattcgcacagagagcggcccgcgtactattagctagttggtgaggtaacggcccaccaaggcgacgatagttacccggcctaagaggg

SEQ ID NO: 10704 - DNA, 301 bp, unidentified
  misc_feature 1..301: note = Ascusbbf_5251B, encodes 16S rRNA
  source 1..301: mol_type = genomic DNA
agagtttgatcatggctcagaacgaacgctggcggcgcgtcttaagcatgcaagtcgagcggtaagattggtgcttgcactaatcctagagcggcggactggtgagtaacgcgtgggtgacgtacctctgtgacggggacagctcctagaaataggagataataccggatacgctgtgtgctgtcagagggcacacaggaaaggatcttttgatccgcacagagagcggcccgcgtactattagctggttggtgaggtaacggcccaccaaggcgacgatagttacccggcctaagagggg

SEQ ID NO: 10705 - DNA, 301 bp, unidentified
  misc_feature 1..301: note = Ascusbbf_5251C, encodes 16S rRNA
  source 1..301: mol_type = genomic DNA
agagtttgatcatggctcagaacgaacgctggcggcgcgtcttaagcatgcaagtcgagcggtaagattggtgcttgcactaatcctagagcggcggactggtgagtaacgcgtgggtgacgtacctctgtgacggggacagctcctagaaataggagataataccggatacgctgcatgttgtcagaggacatgcaggaaaggatcttttgattcgcacagagagcggcccgcgtactattagctagttggtgaggtaacggcccaccaaggcgacgatagttacccggcctaagagggg

SEQ ID NO: 10706 - DNA, 300 bp, unidentified
  misc_feature 1..300: note = Ascusbbf_5251D, encodes 16S rRNA
  source 1..300: mol_type = genomic DNA
agagtttgatcctggctcagaacgaacgctggcggcgcgtcttaagcatgcaagtcgagcggtaagattggtgcttgcactgatcctagagcggcggactggtgagtaacgcgtgggtgacgtacctctgtgacggggacagctcctagaaataggagataataccggatacgctgtgtgctgtcagagggcacacaggaaaggatcttttgatccgcacagagagcggcccgcgtactattagctggttggtgaggtaacggcccaccaaggcgacgatagttacccggcctaagaggg

SEQ ID NO: 10707 - DNA, 301 bp, unidentified
  misc_feature 1..301: note = Ascusbbf_5251E, encodes 16S rRNA
  source 1..301: mol_type = genomic DNA
agagtttgatcctggctcagaacgaacgctggcggcgcgtcttaagcatgcaagtcgagcggtaagattggtgcttgcactaatcctagagcggcggactggtgagtaacgcgtgggtgacgtacctctgtgacggggacagctcctagaaataggagataataccggatacgctgtgtgctgtcagagggcacacaggaaaggatcttttgattcgcacagagagcggcccgcgtactattagctagttggtgaggtaacggcccaccaaggcgacgatagttacccggcctaagagggg

SEQ ID NO: 10708 - DNA, 301 bp, unidentified
  misc_feature 1..301: note = Ascusbbf_5251F, encodes 16S rRNA
  source 1..301: mol_type = genomic DNA
agagtttgatcatggctcagaacgaacgctggcggcgcgtcttaagcatgcaagtcgagcggtaagattggtgcttgcactaatcctagagcggcggactggtgagtaacgcgtgggtgacgtacctctgtgacggggacagctcctagaaataggagataataccggatacgctgtgtgcagtcagagtgcacacaggaaaggatcttttgattcgcacagagagcggcccgcgtactattagctagttggtgaggtaacggcccaccaaggcgacgatagttacccggcctaagagggg

SEQ ID NO: 10709 - DNA, 300 bp, unidentified
  misc_feature 1..300: note = Ascusbbf_5251G, encodes 16S rRNA
  source 1..300: mol_type = genomic DNA
agagtttgatcatggctcagaacgaacgctggcggcgcgtcttaagcatgcaagtcgagcggtaagattggtgcttgcactaatcctagagcggcggactggtgagtaacgcgtgggtgacgtacctctgtgacggggacagctcctagaaataggagataataccggatacgctgtgtgctgtcagagggtacacaggaaaggatcttttgattcgcacagagagcggcccgcgtactattagctagttggtgaggtaacggcccaccaaggcgacgatagttacccggcctaagaggg

SEQ ID NO: 10710 - DNA, 301 bp, unidentified
  misc_feature 1..301: note = Ascusbbf_100A, encodes 16S rRNA
  source 1..301: mol_type = genomic DNA
agagtttgatcctggctcaggatgaacgctagctacaggcttaacacatgcaagtcgaggggaaacgatgagagagcttgctctctcaggcgtcgaccggcgcacgggtgagtaacacgtatccaacctgcctttttccagggaataaccttgcgaaagtaagactaatgccctatgtgtcctttgacggcatcagacgaggacgaaagattcatcggaaagggatggggatgcgcctgattaggcagttggcggggcaacggcccaccaaaccgacgatcagtaggggttctgagaggaa

SEQ ID NO: 10711 - DNA, 300 bp, unidentified
  misc_feature 1..300: note = Ascusbbf_100B, encodes 16S rRNA
  source 1..300: mol_type = genomic DNA
agagtttgatcctggctcaggatgaacgctagctacaggcttaacacatgcaagtcgaggggaaacgatgagagagcttgctctctcaggcgtcgaccggcgcacgggtgagtaacacgtatccaacctgcctttttctagggaataaccttgcgaaagtaagactaatgccctatgtgtcctttgacggcatcagacgaggacgaaagatttatcggaagaggatggggatgcgcctgattaggcagttggcggggcaacggcccaccaaaccgacgatcagtaggggttctgagagga

SEQ ID NO: 10712 - DNA, 301 bp, unidentified; identical to SEQ ID NO: 10522
  misc_feature 1..301: note = Ascusbbf_100C, encodes 16S rRNA
  source 1..301: mol_type = genomic DNA

SEQ ID NO: 10713 - DNA, 301 bp, unidentified
  misc_feature 1..301: note = Ascusbbf_100D, encodes 16S rRNA
  source 1..301: mol_type = genomic DNA
agagtttgatcatggctcaggatgaacgctagctacaggcttaacacatgcaagtcgaggggaaacgatgagagagcttgctctctcaggcgtcgaccggcgcacgggtgagtaacacgtatccaacctgcctttttccagggaataaccttgcgaaagtaagactaatgccctatgtgtcctttgacggcatcagacgaggacgaaagatttatcggaaagggatggggatgcgcctgattaggcagttggcggggtaacggcccaccaaaccgacgatcagtaggggttctgagaggaa

SEQ ID NO: 10714 - DNA, 300 bp, unidentified
  misc_feature 1..300: note = Ascusbbf_100E, encodes 16S rRNA
  source 1..300: mol_type = genomic DNA
agagtttgatcctggctcaggatgaacgctagctacaggcttaacacatgcaagtcgaggggaaacgatgagagagcttgctctctcaggcgtcgaccggcgcacgggtgagtaacacgtatccaacctgcctttttccagggaataaccttgcgaaagtaagactaatgccctatgtgtcctttgacggcatcagacgaggacgaaagatttatcggaaagggatggggatgcgcctgattaggcagttggcggggcaacggcccaccaaaccgacgatcagtaggggttctgagagga

SEQ ID NO: 10715 - DNA, 300 bp, unidentified
  misc_feature 1..300: note = Ascusbbf_100F, encodes 16S rRNA
  source 1..300: mol_type = genomic DNA
agagtttgatcatggctcaggatgaacgctagctacaggcttaacacatgcaagtcgaggggaaacgatgagagagcttgctctctcaggcgtcgaccggcgcacgggtgagtaacacgtatccaacctgcctttttccagggaataaccttgcgaaagtaagactaatgccctatgtgtccttcgacggcatcagacgaggacgaaagatttatcggaagaggatggggatgcgcctgattaggcagttggcggggcaacggcccaccaaaccgacgatcagtaggggttctgagagga

SEQ ID NO: 10716 - DNA, 300 bp, unidentified
  misc_feature 1..300: note = Ascusbbf_100G, encodes 16S rRNA
  source 1..300: mol_type = genomic DNA
agagtttgatcatggctcaggatgaacgctagctacaggcttaacacatgcaagtcgaggggaaacgatgagagagcttgctctctcaggcgtcgaccggcgcacgggtgagtaacacgtatccaacctgcctttttccagggaataaccttgcgaaagtaagactaatgccctatgtgtcctttgacggcatcagacgaggacgaaagatttatcggaagaggatggggatgcgcctgattaggcagttggcggggcaacggcccaccaaaccgacgatcagtaggggttctgagagga

SEQ ID NO: 10717 - DNA, 300 bp, unidentified
  misc_feature 1..300: note = Ascusbbf_20584A, encodes 16S rRNA
  source 1..300: mol_type = genomic DNA
agagtttgatcatggctcaggatgaacgctggcggcgtgcctaatacatgcaagtcgaacgaggtgtagcaatacaccgagtggcgaacgggtgagtaacacgtaggtaacctgcccctaagtctgggatacccaggggaaaccttggctaataccggatagcggcggaggggacatcccttccgcacgaaagtcgcgtttgcgacgctttcggatggacctgcggcacattagctagttggcggggcaacggcccaccaaggcgaggatgtgtagccgacctgagagggtgaacggcca

SEQ ID NO: 10718 - DNA, 300 bp, unidentified
  misc_feature 1..300: note = Ascusbbf_20584B, encodes 16S rRNA
  source 1..300: mol_type = genomic DNA
agagtttgatcctggctcaggatgaacgctggcggcgtgcctaatacatgcaagtcgaacgaggtgtagcaatacaccgagtggcgaacgggtgagtaacacgtaggtaacctgcccctaagtctgggatacccaggggaaaccttggctaataccggatagcggcggaggggacatcccttccgcacgaaagtcgcgtttgcgacgctttcggatggacctgcggcacattagctagttggcggggcaacggcccaccaaggcgaggatgtgtagccgacctgagagggtgaacggcca

SEQ ID NO: 10719 - DNA, 300 bp, unidentified
  misc_feature 1..300: note = Ascusbbf_4317A, encodes 16S rRNA
  source 1..300: mol_type = genomic DNA
agagtttgatcatggctcaggatgaacgctagctacaggcttaacacatgcaagtcgaggggcatcatggagattgcttgcaatttctgatggcgaccggcgcacgggtgagtaacgcgtatccaacctgcctgcaagtagggaatagcccggagaaattcggattaatgccctatgtggccctttgatgacatctgaagagggttaaagattaattgcttgcggatggggatgcgtccgattaggcagacggcggggtaacggcccaccgtgccatcgaacggtaggggttctgagagg

SEQ ID NO: 10720 - DNA, 300 bp, unidentified
  misc_feature 1..300: note = Ascusbbf_4317B, encodes 16S rRNA
  source 1..300: mol_type = genomic DNA
agagtttgatcatggctcaggatgaacgctagctacaggcttaacacatgcaagtcgaggggcatcatggagattgcttgcaatttctgatggcgaccggcgcacgggtgagtaacgcgtatccaacctgcctgcaagtagggaatagcccggagaaattcggattaatgccctatgtggccctttgatgacatctgaagagggttaaagattaattgcttgcggatggggatgcgtccgattaggcagacggcggggtaacggcccaccgtgccatcgatcggtaggggttctgagagg

SEQ ID NO: 10721 - DNA, 300 bp, unidentified
  misc_feature 1..300: note = Ascusbbf_4317C, encodes 16S rRNA
  source 1..300: mol_type = genomic DNA
agagtttgatcatggctcaggatgaacgctagctacaggcttaacacatgcaagtcgaggggcagcatggagattgcttgcaatctttgatggcgaccggcgcacgggtgagtaacgcgtatccaacctgcctgcaagtagggaatagcccggagaaattcggattaatgccctatgtggccctttgatgacatctgaagagggttaaagattaattgcttgcggatggggatgcgtccgattaggcagacggcggggtaacggcccaccgtgccatcgatcggtaggggttctgagagg

SEQ ID NO: 10722 - DNA, 300 bp, unidentified
  misc_feature 1..300: note = Ascusbbf_4317D, encodes 16S rRNA
  source 1..300: mol_type = genomic DNA
agagtttgatcctggctcaggatgaacgctagctacaggcttaacacatgcaagtcgaggggcagcatggagattgcttgcaatctttgatggcgaccggcgcacgggtgagtaacgcgtatccaacctgcctgcaagtagggaatagcccggagaaatccggattaatgtcctatgtggcccttagatgacatctgaagagggttaaagatttatcgcttgcggatggggatgcgtccgattaggcagacggcggggtaacggcccaccgtgccatcgatcggtaggggttctgagagg

SEQ ID NO: 10723 - DNA, 297 bp, unidentified; identical to SEQ ID NO: 10508
  misc_feature 1..297: note = Ascusbbf_4317E, encodes 16S rRNA
  source 1..297: mol_type = genomic DNA

SEQ ID NO: 10724 - DNA, 301 bp, unidentified
  misc_feature 1..301: note = Ascusbbf_6A, encodes 16S rRNA
  source 1..301: mol_type = genomic DNA
agagtttgatcctggctcaggatgaacgctagctacaggcttaacacatgcaagtcgaggggtaacgacagcgaaagcttgcttttgctgggcgacgaccggcgaatgggtgagtaacgcgtatccaacctgccgcaaagtagggcacagccttgcgaaagtaagattaatgccctatgtgctgttttgaagacatctgatgaacagtaaaggttcaccgctttgcgatggggatgcgtctgattaggttgttggcggggtaacggcccaccaagcccgcgatcagtaggggttctgagag

SEQ ID NO: 10725 - DNA, 301 bp, unidentified
  misc_feature 1..301: note = Ascusbbf_6B, encodes 16S rRNA
  source 1..301: mol_type = genomic DNA
agagtttgatcctggctcaggatggacgctagctataggcttaacacatgcaagtcgaggggtaacgacagcgaaagcttgcttttgctgggcgacgaccggcgaatgggtgagtaacgcgtatccaacctgccgcaaagtagggcacagccttgcgaaagtaagattaatgccctatgtgctgtgatgatgacatcagaattgcagtaaaggttcaccgcttcgcgatggggatgcgtctgattaggttgttggcggggtaacggcccaccaagcccgcgatcagtaggggttctgagag

SEQ ID NO: 10726 - DNA, 301 bp, unidentified
  misc_feature 1..301: note = Ascusbbf_6C, encodes 16S rRNA
  source 1..301: mol_type = genomic DNA
agagtttgatcatggctcaggatgaacgctagctacaggcttaacacatgcaagtcgaggggtaacgacagcgaaagcttgcttttgctgggcgacgaccggcgaatgggtgagtaacgcgtatccaacctgccgcaaagtagggcacagccttgcgaaagtaagattaatgccctatgtgctgtgatgatgacatcagaattgcagtaaaggttcaccgctttgcgatggggatgcgtctgattaggttgttggcggggtaacggcccaccaagccagcgatcagtaggggttctgagag

SEQ ID NO: 10727 - DNA, 301 bp, unidentified
  misc_feature 1..301: note = Ascusbbf_6D, encodes 16S rRNA
  source 1..301: mol_type = genomic DNA
agagttagatcatggctcagggtgaacgctagctacaggcttaacacatgcaagtcgaggggtaacgacagcgaaagcttgcttttgctgggcgacgaccggcgaatgggtgagtaacgcgtatccaacctgccgcaaagtagggcacagccttgcgaaagtaagattaatgccctatgtgctgtgatgaggacatctgaactgcagtaaaggttcaccgctttgcgatggggatgcgtctgattaggttgttggcggggtaacggcccaccaagcccgcgatcagtaggggttctgagag

SEQ ID NO: 10728 - DNA, 301 bp, unidentified
  misc_feature 1..301: note = Ascusbbf_6E, encodes 16S rRNA
  source 1..301: mol_type = genomic DNA
agagtttgatcctggctcaggatgaacgctagctacaggcttaacacatgcaagtcgaggggtaacgacagcgaaagcttgcttttgctgggcgacgaccggcgaatgggtgagtaacgcgtatccaacctgccgcaaagtagggcacagccttgcgaaagtaagattaatgccctatgtgctgtgatgatgacatcagaattgcagtaaaggtttaccgctttgcgatggggatgcgtctgattaggttgttggcggggtaacggcccaccaagcccgcgatcagtaggggttctgagag

SEQ ID NO: 10729 - DNA, 301 bp, unidentified
  misc_feature 1..301: note = Ascusbbf_6F, encodes 16S rRNA
  source 1..301: mol_type = genomic DNA
agagtttgatcatggctcaggatgaacgctagctacaggcttaacacatgcaagtcgaggggtaacgacagcgaaagcttgcttttgctgggcgacgaccggcgaatgggtgagtaacgcgtatccaacctgccgcaaagtagggcacagccttgcgaaagtaagattaatgccctatgtgctgttttgaagacatctgatgaacagtaaaggttcaccgctttgcgatggggatgcgtctgattaggttgttggcggggtaacggcccaccaagcccgcgatcagtaggggttctgagag

SEQ ID NO: 10730 - DNA, 301 bp, unidentified
  misc_feature 1..301: note = Ascusbbf_6G, encodes 16S rRNA
  source 1..301: mol_type = genomic DNA
agagtttgatcatggtcaggatgaacgctagctataggcttaacacatgcaagtcgagggataacgacagcgaaagcttgcttttgctgggcgacgaccggcgaatgggtgagtaacgcgtatccaacctgccgcaaagtagggcacagccttgcgaaagtaagattaatgccctatgtgctgtgatgatgacatcagaattgcagtaaaggttcaccgctttgcgatggggatgcgtctgattaggttgttggcggggtaacggcccaccaagcccgcgatcagtaggggttctgagagg

SEQ ID NO: 10731 - DNA, 301 bp, unidentified; identical to SEQ ID NO: 10434
  misc_feature 1..301: note = Ascusbbf_6H, encodes 16S rRNA
  source 1..301: mol_type = genomic DNA

SEQ ID NO: 10732 - DNA, 301 bp, unidentified
  misc_feature 1..301: note = Ascusbbf_6I, encodes 16S rRNA
  source 1..301: mol_type = genomic DNA
agatttgatcctggctcaggatgaacgctagctacaggcttaacacatgcaagtcgaggggtaacgacagcgaaagcttgcttttgctggtcgacgaccggcgaatgggtgagtaacgcgtatccaacctgccgcaaagtagggcacagccttgcgaaagtaagattaatgccctatgtgctgtgatgatgacatcagaattgcagtaaaggttcaccgctttgcgatggggatgcgtctgattaggttgttggcggggtaacggcccaccaagcctgcgatcagtaggggttctgagagg

SEQ ID NO: 10733 - DNA, 301 bp, unidentified
  misc_feature 1..301: note = Ascusbbf_6J, encodes 16S rRNA
  source 1..301: mol_type = genomic DNA
agagtttgatcatggctcaggatgaacgctagctacaggcttaacacatgcaagtcgaggggtaacgacagcgaaagcttgcttttgctggtcgacgaccggcgaatgggtgagtaacgcgtatccaacctaccgcaaagtagggcacagccttgcgaaagtaaaattaatgccctatgtgctgtgatgatgacatcagaattgcagtaaaggttcaccgctttgcgatggggatgcgtctgattaagttgttggcggggtaacagcccaccaagcctgcgatcagtaggggttctgagag

SEQ ID NO: 10734 - DNA, 300 bp, unidentified
  misc_feature 1..300: note = Ascusbbf_6K, encodes 16S rRNA
  source 1..300: mol_type = genomic DNA
agagtttgatcatggctcaggatgaacgctagctacaggcttaacacatgcaagtcgaggggtaacgacagcgaaagcttgcttttgctgggcgacgaccggcgaatgggtgagtaacgcgtatccaacctgccgcaaagtagggcacagccttgcgaaagtaagattaatgccctatgtgctgtgatgaggacatctgaattgcagtaaaggttcaccgctttgcgatggggatgcgtctgattaggttgttggcggggtaacggcccaccaagcccgcgatcagtaggggttctgaga

SEQ ID NO: 10735 - DNA, 300 bp, unidentified
  misc_feature 1..300: note = Ascusbbf_6L, encodes 16S rRNA
  source 1..300: mol_type = genomic DNA
agagtttgatcatggctcaggatgaacgctagctacaggcttaacacatgcaagtcgaggggcagcatatagatagcttgctatttatgatggcgaccggcgcacgggtgagtaacgcgtatccaaccttccctatactagagaatagcccggcgaaagtcggattaatgctctatgttcttctttgatggcatctgacgagaagcaaaggtttaccggtataggatggggatgcgtctgattaggttgttggcggggtaacggcccaccaagcctacgatcagtaggggttctgagagg

SEQ ID NO: 10736 - DNA, 300 bp, unidentified
  misc_feature 1..300: note = Ascusbbf_19022A, encodes 16S rRNA
  source 1..300: mol_type = genomic DNA
agagtttgatcatggctcaggatgaacgctggcggcgtgcctaatacatgcaagtcgagcgagaaattaagaagaagcgttttcgaacaattcatcttaatggaaagcggcggacgggtgagtaacgcgtaggcaacctgcccttagcagagggatagccattggaaacgatgattaaaacctcataacgctgagataacacatgttatctttgccaaagatttatcggctaaggatgggcctgcgtctgattaactagttggtgaggtaacggctcaccaaggtgacgatcagtagccg

SEQ ID NO: 10737 - DNA, 300 bp, unidentified
  misc_feature 1..300: note = Ascusbbf_19022B, encodes 16S rRNA
  source 1..300: mol_type = genomic DNA
agagtttgatcctggctcaggatgaacgctggcggcgtgcctaatacatgcaagtcgagcgagaaattaagaagaagcgttttcgaacaattcatcttaatggaaagcggcggacgggtgagtaacgcgtaggcaacctgcccttagcagagggatagccattggaaacgatgattaaaacctcataacgctgagataacacatgttatctttgccaaagatttatcggctaaggatgggcctgcgtctgattaactagttggtgaggtaacggctcaccaaggtgacgatcagtagccg

SEQ ID NO: 10738 - DNA, 300 bp, unidentified
  misc_feature 1..300: note = Ascusbbf_19022C, encodes 16S rRNA
  source 1..300: mol_type = genomic DNA
agagtttgatcatggctcaggatgaacgctggcggcgtgcctaatacatgcaagtcgagcgagaaattaagaagaagcgttttcgaacaattcatcttaatggaaagcggcggacgggtgagtaacgcgtaggcaacctgcccttagcagagggatagccattggaaacgatgattaaaacctcataacgctgagataacacatgttatctttgccaaagatttgtcggctaaggatgggcctgcgtctgattaactagttggtgaggtaacggctcaccaaggtgacgatcagtagccg

SEQ ID NO: 10739 - DNA, 300 bp, unidentified
  misc_feature 1..300: note = Ascusbbf_2624A, encodes 16S rRNA
  source 1..300: mol_type = genomic DNA
agagtttgatcctggctcaggatgaacgctggcggcgtgcttaacacatgcaagtcgaacgaagcaatttctcacgatcccttcggggtgacgagttattgactgagtggcggacgggtgagtaacgcgtgggtaacctaccttgtacagggggacaacagttggaaacgactgctaataccgcataagcgcacagcttcgcatgaagcagtgtgaaaagttttttcggtacaagatggacccgcgtctgattagctagttggtgaggtaacggctcaccaaggcgacgatcagtagccg

SEQ ID NO: 10740 - DNA, 300 bp, unidentified
  misc_feature 1..300: note = Ascusbbf_2624B, encodes 16S rRNA
  source 1..300: mol_type = genomic DNA
agagtttgatcctggctcaggatgaacgctggcggcgtgcttaacacatgcaagtcgaacgaagcaatttattacgatcccttcggggtgacgatttattgactgagtggcggacgggtgagtaacgcgtgggtaacctaccttgtacagggggataacagttggaaacgactgctaataccgcataagcgcacagcttcgcatgaagcagtgtgaaaagtttttcggtacaagatggacccgcgtctgattagctagttggtgaggtaacggcccaccaaggcgacgatagttacccgg

SEQ ID NO: 10741 - DNA, 300 bp, unidentified
  misc_feature 1..300: note = Ascusbbf_2624C, encodes 16S rRNA
  source 1..300: mol_type = genomic DNA
agagtttgatcctggctcaggatgaacgctggcggcgtgcttaacacatgcaagtcgaacgaagcaatttattacaatcccttcggggtgacgatttattgactgagtggcggacgggtgagtaacgcgtgggtaacctaccttgtacagggggataacagttggaaacgactgctaataccgcataagcgcacagcttcgcatgaagcagtgtgaaaagttttttcggtataagatggacccgcgtctgattagctagttggtgaggtaacggcccaccaaggcgacgatcagtagccg

SEQ ID NO: 10742 - DNA, 300 bp, unidentified
  misc_feature 1..300: note = Ascusbbf_2624D, encodes 16S rRNA
  source 1..300: mol_type = genomic DNA
agagtttgatcctggctcaggatgaacgctggcggcgtgcttaacacatgcaagtcgaacgaagcaatttattacgatcccttcggggtgacgatttattgactgagtggcggacgggtgagtaacgcgtgggtaacctaccttgtacagggggataacagttggaaacgactgctaataccgcataagcgcacagcttcgcatgaagcagtgtgaaaagttttttcggtataagatggacccgcgtctgattagctagttggtgaggtaacggcccaccaaggcgacgatcagtagccg

SEQ ID NO: 10743 - DNA, 300 bp, unidentified
  misc_feature 1..300: note = Ascusbbf_2624E, encodes 16S rRNA
  source 1..300: mol_type = genomic DNA
agagtttgatcatggctcaggatgaacgctggcggcgtgcttaacacatgcaagtcgaacgaagcaacttatcacgatcccttcggggtgacgatttgttgactgagtggcggacgggtgagtaacgcgtgggtaacctaccttgtacagggggacaacagttggaaacgactgctaataccgcataagcgcacagcttcgcatgaagcagtgtgaaaagttttttcggtacaagatggacccgcgtctgattagctagttggtgaggtaacggcccaccaaggcgacgatcagtagccg

SEQ ID NO: 10744 - DNA, 300 bp, unidentified
  misc_feature 1..300: note = Ascusbbf_2624F, encodes 16S rRNA
  source 1..300: mol_type = genomic DNA
agagtttgatcatggctcaggatgaacgctggcggcgtgcttaacacatgcaagtcgaacgaagcaatttctcacgatcccttcggggtgacgagttattgactgagtggcggacgggtgagtaacgcgtgggtaacctaccttgtacagggggacaacagttggaaacgactgctaataccgcataagcgcacagcttcgcatgaagcagtgtgaaaagttttttcggtacaagatggacccgcgtctgattagctagttggtgaggtaacggctcaccaaggcgacgatcagtagccg

SEQ ID NO: 10745 - DNA, 300 bp, unidentified
  misc_feature 1..300: note = Ascusbbf_2624G, encodes 16S rRNA
  source 1..300: mol_type = genomic DNA
agagtttgatcatggctcaggatgaacgctggcggcgtgcttaacacatgcaagtcgaacgaagcaatttattacgatcccttcggggtgacgatttattgactgagtggcggacgggtgagtaacgcgtgggtaacctaccttgtacagggggataacagttggaaacgactgctaataccgcataagcgcacagcttcgcatgaagcagtgtgaaaagttttttcggtataagatggacccgcgtctgattagctagttggtgaggtaacggcccaccaaggcgacgatcagtagccg

SEQ ID NO: 10746 - DNA, 301 bp, unidentified
  misc_feature 1..301: note = Ascusbbf_3427A, encodes 16S rRNA
  source 1..301: mol_type = genomic DNA
agagtttgatcctggctcaggatgaacgctagcggcaggcttaacacatgcaagtcgaggggtaacaggggatgtagcaatacatcctgctgacgaccggcgcacaggtgcgtaacgcgtatgcaacctgcccgcaacaggggtataacggagtgaaaattccactaatcccccatattgtcattaggccgcatggctttatgacgaaaggttattctggttgcggatgggcatgcgtgacattaggtagttggcggggtaacggcccaccaagccgacgatgtctaggggagctgagagg

SEQ ID NO: 10747 - DNA, 301 bp, unidentified; identical to SEQ ID NO: 10393
  misc_feature 1..301: note = Ascusbbf_3427B, encodes 16S rRNA
  source 1..301: mol_type = genomic DNA

SEQ ID NO: 10748 - DNA, 301 bp, unidentified
  misc_feature 1..301: note = Ascusbbf_3427C, encodes 16S rRNA
  source 1..301: mol_type = genomic DNA
agagtttgatcctggctcaggatgaacgctagcggcaggcttaacacatgcaagtcgaggggtaacaggggatgtagcaatacatcctgctgacgaccggcgcacgggtgcgtaacgcgtatgcaacctgcccgcaacaggggtataacggagtgaaaattccactaatcccccatattgtcattaggccgcatggctttatgacgaaaggttattctggttgcggatgggcatgcgtgacattaggtagttggcggggtaacggcccaccaagccgacgatgtctaggggagctgagagg

SEQ ID NO: 10749 - DNA, 301 bp, unidentified
  misc_feature 1..301: note = Ascusbbf_3427D, encodes 16S rRNA
  source 1..301: mol_type = genomic DNA
agagtttgatcatggctcaggatgaacgctagcggcaggcttaacacatgcaagtcgaggggtaacaggggatgtagcaatacatcctgctgacgaccggcgcacgggtgcgtaacgcgtatgcaacctgcccgcaacaggggtataacggagtgaaaattccactaatcccccatattgtcattaggccgcatggccggatgacgaaaggttattctggttgcggatgggcatgcgtgacattaggtagttggcggggtaacggcccaccaagccgacgatgtctaggggagctgagagg

SEQ ID NO: 10750 - DNA, 300 bp, unidentified
  misc_feature 1..300: note = Ascusbbf_3427E, encodes 16S rRNA
  source 1..300: mol_type = genomic DNA
agatttgatcctggctcaggatgaacgctagcggcaggcttaacacatgcaagtcgaggggtaacaggggatgtagcaatacgtcctgctgacgaccggcgcacgggtgcgtaacgcgtatgcaacctgcccgcaacaggggtataacggagtgaaaattccactaatcccccatattgtcattaggccgcatggctttatgacgaaaggttattctggttgcggatgggcatgcgtgacattaggtagttggcggggtaacggcccaccaagccgacgatgtctaggggagctgagagg

SEQ ID NO: 10751 - DNA, 300 bp, unidentified
  misc_feature 1..300: note = Ascusbbf_5005A, encodes 16S rRNA
  source 1..300: mol_type = genomic DNA
agagtttgatcatggctcaggatgaacgctagctacaggcttaacacatgcaagtcgaggggcagcattgagatagcttgctatttcagatggcgaccggcgcacgggtgagtaacgcgtatccaacctggcccgtagtagggaacagcccggcgaaagtcggattaatgccctatgttctccgacgaagacatctgagttggagcaaagattcatcgctacgggatggggatgcgtctgattaggtagtaggcggggtaacggcccacctagccaacgatcagtaggggttctgagagg

SEQ ID NO: 10752 - DNA, 301 bp, unidentified; identical to SEQ ID NO: 10482
  misc_feature 1..301: note = Ascusbbf_5005B, encodes 16S rRNA
  source 1..301: mol_type = genomic DNA

SEQ ID NO: 10753 - DNA, 300 bp, unidentified
  misc_feature 1..300: note = Ascusbbf_69A, encodes 16S rRNA
  source 1..300: mol_type = genomic DNA
agagtttgatcatggctcaggatgaacgctagctacaggcttaacacatgcaagtcgaggggcagcattatcgaagcttgctttgatagatggcgaccggcgcacgggtgagtaacgcgtatccaaccttccctatagtagagaatagcccggcgaaagtcggattaatgctctatgttgtatttagaggacatctgaagaataccaaaggtttaccgctataggatggggatgcgtctgattaggtagtaggcggggtaacggcccacctagccgacgatcagtaggggttctgagagg

SEQ ID NO: 10754 - DNA, 300 bp, unidentified
  misc_feature 1..300: note = Ascusbbf_69B, encodes 16S rRNA
  source 1..300: mol_type = genomic DNA
agagtttgatcctggctcaggatgaacgctagctacaggcttaacacatgcaagtcgaggggcagcatgatcgaagcttgctttgattgatggcgaccggcgcacgggtgagtaacgcgtatccaaccttccctatagtagagaatagcccggcgaaagtcggattaatgctctatgttgtatttagaagacatctgaagaataccaaaggtttaccgctataggatggggatgcgtctgattaggtagtaggcggggtaacggcccacctagccgacgatcagtaggggttctgagagg

SEQ ID NO: 10755 - DNA, 300 bp, unidentified
  misc_feature 1..300: note = Ascusbbf_69C, encodes 16S rRNA
  source 1..300: mol_type = genomic DNA
agagtttgatcctggctcaggatgaacgctagctacaggcttaacacatgcaagtcgaggggcagcataacgaaagcttgcttttgttgatggcgaccggcgcacgggtgagtaacgcgtatccaaccttccctatagtagagaatagcccggcgaaagtcggattaatgctctatgttgtatttagaggacatctgaagaataccaaaggttcaccgctataggatggggatgcgtctgattaggtagtaggcggggtaacggcccacctagccgacgatcagtaggggttctgagagg

SEQ ID NO: 10756 - DNA, 301 bp, unidentified
  misc_feature 1..301: note = Ascusbbf_69D, encodes 16S rRNA
  source 1..301: mol_type = genomic DNA
agagtttgatcctggctcaggatgaacgctagctacaggcttaacacatgcaagtcgaggagcagcatgatcgaagcttgctttgattgatggcgaccggcgcacgggtgagtaacgcgtatccaaccttccctatagtagagaatagcccggcgaaagtcggattaatgctctatgttgtatttagaggacatctgaagaataccaaaggttcaccgctataggatggggatgcgtctgattaggttgttggcggggtaacggcccaccaagccgacgatcagtaggggttctgagagga

SEQ ID NO: 10757 - DNA, 300 bp, unidentified
  misc_feature 1..300: note = Ascusbbf_69E, encodes 16S rRNA
  source 1..300: mol_type = genomic DNA
agagtttgatcatggctcaggatgaacgctagctacaggcttaacacatgcaagtcgaggggcagcatgatcgaagcttgctttgattgatggcgaccggcgcacgggtgagtaacgcgtatccaaccttccctatagtagagaatagcccggcgaaagtcggattaatgctctatgttgtatttagaggacatctgaagaataccaaaggtttaccgctataggatggggatgcgtctgattaggttgttggcggggtaacggcccaccaagccgacgatcagtaggggttctgagagg

SEQ ID NO: 10758 - DNA, 300 bp, unidentified
  misc_feature 1..300: note = Ascusbbf_69F, encodes 16S rRNA
  source 1..300: mol_type = genomic DNA
agagtttgatcatggctcaggatgaacgctagctacaggcttaacacatgcaagtcgaggggcagcatgatcgaagcttgctttgattgatggcgaccggcgcacgggtgagtaacgcgtatccaaccttccctatagtagagaatagcccggcgaaagtcggattaatgctctatgttgtatttagaagacatctgaagaataccaaaggtttaccgctataggatggggatgcgtctgattaggtagtaggcggggtaacggcccacctagccgacgatcagtaggggttctgagagg

SEQ ID NO: 10759 - DNA, 301 bp, unidentified
  misc_feature 1..301: note = Ascusbbf_69G, encodes 16S rRNA
  source 1..301: mol_type = genomic DNA
agagtttgatcctggctcaggatgaacgctagctacaggcttaacacatgcaagtcgaggggcagcatgatcgaagcttgctttgattgatggcgaccggcgcacgggtgagtaacgcgtatccaaccttccctatagtagagaatagcccggcgaaagtcggattaatgctctatgttgtatttagaggacatctgaagaataccaaaggtttaccgctataggatggggatgcgtctgattaggttgttggcggggtgacggcccactaagcctacgatcagtaggggttctgagagga

SEQ ID NO: 10760 - DNA, 300 bp, unidentified
  misc_feature 1..300: note = Ascusbbf_69H, encodes 16S rRNA
  source 1..300: mol_type = genomic DNA
agagtttgatcctggctcaggatgaacgctagctacaggcttaacacatgcaagtcgaggggcagcattatcgaagcttgctttgatagatggcgaccggcgcacgggtgagtaacgcgtatccaaccttccctatagtagagaatagcccggcgaaagtcggattaatgctctatgttgtatttagaagacatctgaagaataccaaaggtttaccgctataggatggggatgcgtctgattaggtagtaggcggggtaacggcccacctagccgacgatcagtaggggttctgagagg

SEQ ID NO: 10761 - DNA, 301 bp, unidentified
  misc_feature 1..301: note = Ascusbbf_69I, encodes 16S rRNA
  source 1..301: mol_type = genomic DNA
agagtttgatcctggctcaggatgaacgctagctacaggcttaacacatgcaagtcgaggggcagcatgatcaaagcttgctttgattgatggcgaccggcgcacgggtgagtaacgcgtatccaaccttccctatagtagaggatagcccggcgaaagtcggattaatactctatgttgtatttagatgacatcagaagaataccaaaggtttaccgctataggatggggatgcgtctgattaggtagtcggcggggtaacggcccaccgagccatcgatcagtaggggttctgagagga

SEQ ID NO: 10762 - DNA, 300 bp, unidentified
  misc_feature 1..300: note = Ascusbbf_69J, encodes 16S rRNA
  source 1..300: mol_type = genomic DNA
agagtttgatcatggctcaggatgaacgctagctacaggcttaacacatgcaagtcgaggggcagcattatcgaagcttgctttgatagatggcgaccggcgcacgggtgagtaacgcgtatccaaccttccctatagtagagaatagcccggcgaaagtcggattaatgctctatgttgtatttagaagacatctgaagaataccaaaggtttaccgctataggatggggatgcgtctgattaggtagtaggcggggtaacggcccacctagccgacgatcagtaggggttctgagagg

SEQ ID NO: 10763 - DNA, 300 bp, unidentified
  misc_feature 1..300: note = Ascusbbf_8082A, encodes 16S rRNA
  source 1..300: mol_type = genomic DNA
agagtttgatcatggctcaggacgaacgctggcggcgtgcttaacacatgcaagtcgaacggggaattttatctcggtagaattcctagtggcgaacgggtgagtaacgcgtaggcaacctgcccttcagacggggacaacatcccgaaaggggtgctaataccggatacgaagctcctgccgcatgacgggagcttgaaaggcgcaaacaagcgccgctgagggatgggcctgcgtccgattagcttgttggtggggtaacggcccaccaaggcgacgatcggtagccggtctgagagg

SEQ ID NO: 10764 - DNA, 300 bp, unidentified
  misc_feature 1..300: note = Ascusbbf_8082B, encodes 16S rRNA
  source 1..300: mol_type = genomic DNA
agagtttgatcctggctcaggacgaacgctggcggcgtgcttaacacatgcaagtcgaacggggaattttatctcggtagaattcctagtggcgaacgggtgagtaacgcgtaggcaacctgcccttcagacggggacaacatcccgaaaggggtgctaataccggatacgaagctcctgccgcatgacgggagcttgaaaggcgcaaacaagcgccgctgagggatgggcctgcgtccgattagcttgttggtggggtaacggcccaccaaggcgacgatcggtagccggtctgagagg

SEQ ID NO: 10765 - DNA, 300 bp, unidentified
  misc_feature 1..300: note = Ascusbbf_8082C, encodes 16S rRNA
  source 1..300: mol_type = genomic DNA
agagtttgatcctggctcaggacgaacgctggcggcgtgcttaacacatgcaagtcgaacggggaattctgcttcggtggaattcctagtggcgaacgggtgagtaacgcgtaggcaacctgcccttcagacggggacaacatcccgaaaggggtgctaataccggatacgaagctcctgccgcatgacgggagcttgaaaggcgcaaacaagcgccgctgagggatgggcctgcgtccgattagcttgttggtggggtaacggcccaccaaggcgacgatcggtagccggtctgagagg

SEQ ID NO: 10766 - DNA, 300 bp, unidentified
  misc_feature 1..300: note = Ascusbbf_8082D, encodes 16S rRNA
  source 1..300: mol_type = genomic DNA
agagtttgatcatggctcaggacgaacgctggcggcgtgcttaacacatgcaagtcgaacggggaattctgcttcggtggaattcctagtggcgaacgggtgagtaacgcgtaggcaacctgcccttcagacggggacaacatcccgaaaggggtgctaataccggatacgaagctcctgccgcatgacgggagcttgaaaggcgcaaacaagcgccgctgagggatgggcctgcgtccgattagcttgttggtggggtaacggcccaccaaggcgacgatcggtagccggtctgagagg

SEQ ID NO: 10767 - DNA, 301 bp, unidentified
  misc_feature 1..301: note = Ascusbbf_8082E, encodes 16S rRNA
  source 1..301: mol_type = genomic DNA
agagtttgatcatggctcagattgaacgctggcggcaggcctaatacatgcaagtcgaacggtaacataagaaaagcttgcttttcttgatgacgagtggcggacgggtgagtaatatttgggaagctacctgatagagggggacaacagttggaaacgactgctaataccgcatacagccttagggtgaaagaagaaattcgctatcagatgtgcccaaatgggattagctagtaggtgaggtaaaggctcacctaggcgacgatctctagctggtctgagaggatgatcagccacattg

SEQ ID NO: 10768 - DNA, 300 bp, unidentified
  misc_feature 1..300: note = Ascusbbf_8082F, encodes 16S rRNA
  source 1..300: mol_type = genomic DNA
agagtttgatcatggctcaggacgaacgctggcggcgtgcttaacacatgcaagtcgaacggggaattctgcttcggtagaattcctagtggcgaacgggtgagtaacgcgtaggcaacctgcccttcagacggggacaacatcccgaaaggggtgctaataccggatacgaagctcctgccgcatgacgggagcttgaaaggcgcaaacaagcgccgctgagggatgggcctgcgtccgattagcttgttggtggggtaacggcccaccaaggcgacgatcggtagccggtctgagagg

SEQ ID NO: 10769 - DNA, 300 bp, unidentified
  misc_feature 1..300: note = Ascusbbf_8082G, encodes 16S rRNA
  source 1..300: mol_type = genomic DNA
agagtttgatcatggctcaggacgaacgctggcggcgtgcttaacacatgcaagccgaacggggaattctgcttcggtagaattcctagtggcgaacgggtgagtaacgcgtaggcaacctgcccttcagacggggacaacatcccgaaaggggtgctaataccggatacgaagctcctgccgcatgacgggagcttgaaaggcgcaaacaagcgccgctgagggatgggcctgcgtccgattagcttgttggtggggtaacggcccaccaaggcgacgatcggtagccggtctgagagg

SEQ ID NO: 10770 - DNA, 301 bp, unidentified
  misc_feature 1..301: note = Ascusbbf_8082H, encodes 16S rRNA
  source 1..301: mol_type = genomic DNA
agagtttgatcatggctcaggatgaacgctagcgacaggcctaacacatgcaagtcgaggggcagcgggattgaagcttgctttaattgccggcgaccggcgcacgggtgcgtaacaggtgtgcaatctgtccatagtcggggaatagcccagcgaaagctggattaatgctccatgtgaatcgagaccgcatgattttgatttgaaacgtaaggactatgggtgagcacgcttctgattagatagttggtgaggtaacggctcaccaagtcgacgatcagtaggggttctgagaggaagg

SEQ ID NO: 10771 - DNA, 298 bp, unidentified; identical to SEQ ID NO: 10425
  misc_feature 1..298: note = Ascusbbf_8082I, encodes 16S rRNA
  source 1..298: mol_type = genomic DNA

SEQ ID NO: 10772 - DNA, 301 bp, unidentified
  misc_feature 1..301: note = Ascusbbf_95A, encodes 16S rRNA
  source 1..301: mol_type = genomic DNA
agagtttgatcatggctcaggatgaacgctagctacaggcttaacacatgcaagtcgaggggcagcgagaaggaagcttgctttctttgtcggcgaccggcgcacgggtgagtaacgcgtatccaaccttccccttagtagggcatagcccggcgaaagtcggattaacaccctatgttatccgaagaggacatctgaattggattaaaggtttaccgctaagggatggggatgcgtctgattaggtagtaggcggggtaacggcccacctagccgacgatcagtaggggttctgagagga

SEQ ID NO: 10773 - DNA, 300 bp, unidentified
  misc_feature 1..300: note = Ascusbbf_95B, encodes 16S rRNA
  source 1..300: mol_type = genomic DNA
agagtttgatcctggctcaggatgaacgctagctacaggcttaacacatgcaagtcgaggggcagcgagaggaaagcttgctttccttgtcggcgaccggcgcacgggtgagtaacgcgtatccaaccttccccttagtagggcatagcccggcgaaagtcggattaacaccctatgttatccgaagaggacatctgaattggattaaaggtttaccgctaagggatggggatgcgtctgattaggtagtaggcggggtaacggcccacctagccgacgatcagtaggggttctgagagg

SEQ ID NO: 10774 - DNA, 299 bp, unidentified
  misc_feature 1..299: note = Ascusbbf_95C, encodes 16S rRNA
  source 1..299: mol_type = genomic DNA
agagtttgatcatggctcaggatgaacgctagctacaggcttaacacatgcaagtcgaggggcagcgagaggaaagcttgctttccttgtcggcgaccggcgcacgggtgagtaacgcgtatccaaccttccccttagtagggcatagcccggcgaaagtcggattaacaccctatgttatccgaagaggacatctgaattggattaaaggtttaccgctaagggatggggatgcgtctgattaggtagtaggcggggtaacggcccacctagccgacgatcagtaggggttctgagag

SEQ ID NO: 10775 - DNA, 300 bp, unidentified
  misc_feature 1..300: note = Ascusbbf_95D, encodes 16S rRNA
  source 1..300: mol_type = genomic DNA
agagtttgatcctggctcaggatgaacgctagctacaggcttaacacatgcaagtcgaggggcagcgagaaggaagcttgctttctttgtcggcgaccggcgcacgggtgagtaacgcgtatccaaccttccccttagtagggcatagcccggcgaaagtcggattaacaccctatgttatccgaagaggacatctgaattggattaaaggtttaccgctaagggatggggatgcgtctgattaggtagtaggcggggtaacggcccacctagccgacgatcagtaggggttctgagagg

SEQ ID NO: 10776 - DNA, 300 bp, unidentified
  misc_feature 1..300: note = Ascusbbf_95E, encodes 16S rRNA
  source 1..300: mol_type = genomic DNA
agagtttgatcatggctcaggatgaacgctagctacaggcttaacacatgcaagtcgaggggcagcgagaagaaagcttgctttctttgtcggcgaccggcgcacgggtgagtaacgcgtatccaaccttccccttagtagggcatagcccggcgaaagtcggattaataccctatgttatccgaagaggacatctgaattggattaaagatttatcgctaagggatggggatgcgtctgattaggtagtaggcggggtaacggcccacctagcctacgatcagtaggggttctgagagg

SEQ ID NO: 10777 - DNA, 300 bp, unidentified
  misc_feature 1..300: note = Ascusbbf_95F, encodes 16S rRNA
  source 1..300: mol_type = genomic DNA
agagtttgatcatggctcaggatgaacgctagctacaggcttaacacatgcaagtcgaggggcagcgggaagaaagcttgctttctttgccggcgaccggcgcacgggtgagtaacgcgtatccaaccttccccttagtagggcatagcccggcgaaagtcggattaataccctatgttatccgaagaggacatctgaattggattaaagatttatcgctaagggatggggatgcgtctgattaggtagtaggcggggtaacggcccacctagcctacgatcagtaggggttctgagagg

SEQ ID NO: 10778 - DNA, 300 bp, unidentified
  misc_feature 1..300: note = Ascusbbf_95G, encodes 16S rRNA
  source 1..300: mol_type = genomic DNA
agagtttgatcctggctcaggatgaacgctagctacaggcttaacacatgcaagtcgaggggcagcgggaagaaagcttgctttctttgccggcgaccggcgcacgggtgagtaacgcgtatccaaccttccccttagtagggcatagcccggcgaaagtcggattaataccctatgttatccgaagaggacatctgaattggattaaagatttatcgctaagggatggggatgcgtctgattaggtagtaggcggggtaacggcccacctagcctacgatcagtaggggttctgagagg

SEQ ID NO: 10779 - DNA, 300 bp, unidentified
  misc_feature 1..300: note = Ascusbbf_95H, encodes 16S rRNA
  source 1..300: mol_type = genomic DNA
agagtttgatcctggctcaggatgaacgctagctacaggcttaacacatgcaagtcgaggggcagcgagaagaaagcttgctttctttgtcggcgaccggcgcacgggtgagtaacgcgtatccaaccttccccttagtagggcatagcccggcgaaagtcggattaataccctatgttatccgaagaggacatctgaattggattaaagatttatcgctaagggatggggatgcgtctgattaggtagtaggcggggtaacggcccacctagcctacgatcagtaggggttctgagagg

SEQ ID NO: 10780 - DNA, 301 bp, unidentified
  misc_feature 1..301: note = Ascusbbf_1136A, encodes 16S rRNA
  source 1..301: mol_type = genomic DNA
agagtttgatcatggctcaggatgaacgctggcggcgtgcctaacacatgcaagtcgaacggtgtgatgattgaagttttcggacagatatcattacatagtggcggacgggtgagtaacgcgtggagaacctgcactgtactgggggatagcagctggaaacggctggtaataccgcatgagaccacgggagggcatcctcctgaggcaaaagatttatcggtacaggatggatccgcgtttgattagccagttggcggggtaacggcccaccaaagcgacgatcaatagccggcctgag

SEQ ID NO: 10781 - DNA, 301 bp, unidentified
  misc_feature 1..301: note = Ascusbbf_1136B, encodes 16S rRNA
  source 1..301: mol_type = genomic DNA
agagtttgatcctggctcaggatgaacgctggcggcgtgcctaacacatgcaagtcgaacggtgtaatgattgaagttttcggacagatttcattacatagtggcggacgggtgagtaacgcgtggagaacctgcactgtactgggggatagcagctggaaacggctggtaataccgcatgagaccacgggagggcatcctcctgaggcaaaagatttatcggtacaggatggatccgcgtttgattagccagttggcggggtaacggcccaccaaagcgacgatcaatagccggcctgag

SEQ ID NO: 10782 - DNA, 301 bp, unidentified
  misc_feature 1..301: note = Ascusbbf_1136C, encodes 16S rRNA
  source 1..301: mol_type = genomic DNA
agagtttgatcatggctcaggatgaacgctggcggcgtgcctaacacatgcaagtcgaacggtgtaatgattgaagttttcggacagatatcattatatagtggcggacgggtgagtaacgcgtggagaacctgcactgtactgggggatagcagctggaaacggctggtaataccgcatgagaccacgggagggcatccttctgaggcaaaagatttatcggtacaggatggatccgcgtttgattagccagttggcggggtaacggcccaccaaagcgacgatcaatagccggcctgag

SEQ ID NO: 10783 - DNA, 301 bp, unidentified
  misc_feature 1..301: note = Ascusbbf_1136D, encodes 16S rRNA
  source 1..301: mol_type = genomic DNA
agagtttgatcatggctcaggatgaacgctggcggcgtgcctaacacatgcaagtcgaacggtgtaatgattgaagttttcggacagatttcattacatagtggcggacgggtgagtaacgcgtggagaacctgcactgtactgggggatagcagctggaaacggctggtaataccgcatgagaccacgggagggcatcctcctgaggcaaaagatttatcggtacaggatggatccgcgtttgattagccagttggcggggtaacggcccaccaaagcgacgatcaatagccggcctgag

SEQ ID NO: 10784 - DNA, 301 bp, unidentified
  misc_feature 1..301: note = Ascusbbf_1136E, encodes 16S rRNA
  source 1..301: mol_type = genomic DNA
agagtttgatcctggctcaggatgaacgctggcggcgtgcctaacacatgcaagtcgaacggtgtgatgattgaagttttcggacagatatcattacatagtggcggacgggtgagtaacgcgtggagaacctgcactgtactgggggatagcagctggaaacggctggtaataccgcatgagaccacgggagggcatcctcctgaggcaaaagatttatcggtacaggatggatccgcgtttgattagccagttggcggggtaacggcccaccaaagcgacgatcaatagccggcctgag

SEQ ID NO: 10785 - DNA, 301 bp, unidentified
  misc_feature 1..301: note = Ascusbbf_1136F, encodes 16S rRNA
  source 1..301: mol_type = genomic DNA
agagtttgatcatggctcaggatgaacgctggcggcgtgcctaacacatgcaagtcgaacggtgtaatgattgaagttttcggacagatatcattacatagtggcggacgggtgagtaacgcgtggagaacctgcactgtactgggggatagcagctggaaacggctggtaataccgcatgagaccacgggagggcatcctcctgaggcaaaagatttatcggtacaggatggatccgcgtttgattagccagttggaggggtaacggcccaccaaggcgacgatcagtagccggtctgag

SEQ ID NO: 10786 - DNA, 300 bp, unidentified
  misc_feature 1..300: note = Ascusbbf_2770A, encodes 16S rRNA
  source 1..300: mol_type = genomic DNA
agagtttgatcatggctcaggataaacgccggcggcgtgcctaatacatgcaagtcgaacgaggctcttcggagccgagtggcgtacgggtgagtaacacgttggtaacctgccctccagaccggaataccagagagaaatctctgctaatgccggatgacgtcatatggtcgcaagaccacttgaccaaaggcggcaactgccgcgctgaaggatggacctgcgtcgcattagctagttggcgggataatggcccaccaaggcgaggatgcgtagccgagctgagaggctaaacggcca

SEQ ID NO: 10787 - DNA, 300 bp, unidentified
  misc_feature 1..300: note = Ascusbbf_2770B, encodes 16S rRNA
  source 1..300: mol_type = genomic DNA
agagtttgatcctggctcaggataaacgccggcggcgtgcctaatacatgcaagtcgaacgaggctcttcggagccgagtggcgtacgggtgagtaacacgttggtaacctgccctccagaccggaataccagagagaaatctctgctaatgccggatgacgtcatatggtcgcaagaccacttgaccaaaggcggcaactgccgcgctgaaggatggacctgcgtcgcattagctagttggcgggataatggcccaccaaggcgaggatgcgtagccgagctgagaggctaaacggcca

SEQ ID NO: 10788 - DNA, 300 bp, unidentified
  misc_feature 1..300: note = Ascusbbf_2770C, encodes 16S rRNA
  source 1..300: mol_type = genomic DNA
agagtttgatcctggctcagaatagacgccggcggcgtgcctaatacatgcaagtcgaacgaggctcttcggagccgagtggcgtacgggtgagtaacacgttggtaacctgccctccagaccggaataccagagagaaatctctgctaatgccggatgacgtcatatggtcgcaagaccacttgaccaaaggcggcaactgccgcgctgaaggatggacctgcgtcgcattagctagttggcgggataatggcccaccaaggcgaggatgcgtagccgagctgagaggctaaacggcca

SEQ ID NO: 10789 - DNA, 298 bp, unidentified; identical to SEQ ID NO: 10425
  misc_feature 1..298: note = Ascusbbf_1629A, encodes 16S rRNA
  source 1..298: mol_type = genomic DNA

SEQ ID NO: 10790 - DNA, 299 bp, unidentified
  misc_feature 1..299: note = Ascusbbf_1629B, encodes 16S rRNA
  source 1..299: mol_type = genomic DNA
agagtttgatcctggctcaggatgaacgctggcggcgtgcctaatacatgcaagtcgagcgaaccacttcggtggtgagcggcgaacgggtgagtaacacgtaggcgatctgcccatcagacggggacaacgattggaaacgatcgctaataccggataggacgaaagtttaaaggtgcttctggcaccgctgatggatgagcctgcggcgcattagctagttggtagggtaaaggcctaccaaggcgacgatgcgtagccgacctgagagggtgaacggccacactgggactgagaca

SEQ ID NO: 10791 - DNA, 301 bp, unidentified; identical to SEQ ID NO: 10341
  misc_feature 1..301: note = Ascusbbf_1629C, encodes 16S rRNA
  source 1..301: mol_type = genomic DNA

SEQ ID NO: 10792 - DNA, 301 bp, unidentified
  misc_feature 1..301: note = Ascusbbf_1629D, encodes 16S rRNA
  source 1..301: mol_type = genomic DNA
agagtttgatcatggctcaggatgaacgctggcggcgtgcctaatacatgcaagtcgagcgaaccacttcggtggtgagcggcgaacgggtgagtaacacgtaggtgatctgcccatcagacggggacaacgattggaaacgatcgctaataccggataggacgaaagtttaaaggtgcttctggcaccgctgatggatgagcctgcggcgcattagctagttggtagggtaaaggcctaccaaggcgacgatgcgtagccgacctgagagggtgaacggccacactgggactgagacacg

SEQ ID NO: 10793 - DNA, 301 bp, unidentified
  misc_feature 1..301: note = Ascusbbf_1629E, encodes 16S rRNA
  source 1..301: mol_type = genomic DNA
agagtttgatcctggctcaggatgaacgctggcggcgtgcctaatacatgcaagtcgagcgaaccacttcggtggtgagcggcgaacgggtgagtaacacgtaggtgatctgcccatcagacggggacaacgattggaaacgatcgctaataccggataggacgaaagtttaaaggtgcttctggcaccgctgatggatgagcctgcggcgcattagctagttggtagggtaaaggcctaccaaggcgacgatcagtagccggcctgagagggcggacggccacattgggactgagacacg

SEQ ID NO: 10794 - DNA, 301 bp, unidentified
  misc_feature 1..301: note = Ascusbbf_1629F, encodes 16S rRNA
  source 1..301: mol_type = genomic DNA
agagtttgatcctggctcaggatgaacgctggcggcgtgcctaatacatgcaagtcgagcgaaccacttcggtggtgagcggcgaacgggtgagtaacacgtaggtgatctgcccatcagacgggggcaacgattggaaacgatcgctaatactggataggacgaaagtttaaaggtgcttctggcaccgctgatggatgagcctgcggcgcattagctagttggtagggtaaaggcctaccaaggcgacgatgcgtagccgacctgagagggtgaacggccacactgggactgagacacg

SEQ ID NO: 10795 - DNA, 301 bp, unidentified
  misc_feature 1..301: note = Ascusbbf_1629G, encodes 16S rRNA
  source 1..301: mol_type = genomic DNA
agatttgatcctggctcaggatgaacgctggcggcgtgcctaatacatgcaagtcgagcgaaccacttcggtggtgagcggcgaacgggtgagtaacacgtaggtgatctgcccatcagacggggacaacgattggaaacgatcgctaataccggataggacgaaagtttaaaggtgcttctggcaccgctgatggatgagcctgcggcgcattagctagttggtagggtaaaggcctaccaaggcgacgatgcgtagccgacctgagagggtgaacggccacactgggactgagacacgg

SEQ ID NO: 10796 - DNA, 300 bp, unidentified
  misc_feature 1..300: note = Ascusbbf_1821A, encodes 16S rRNA
  source 1..300: mol_type = genomic DNA
agagtttgatcctggctcaggataaacgctggcggcgtgcctaatacatgcaagtcgaggggcagcacggagactgcttgcagtctctggtggcgaccggcggatgggtgagtaacgcgtatccaacctgcccgtgacccggggacagccttccgaaaggaagattaatacccgatgttccggcgtgcgcgcatgcgctgcgccggcaaagtttttctgcggtgacggatggggatgcgtctgattaggctgcaggcggggtaacggcccacctggccatcgatcagtaggggttctgag

SEQ ID NO: 10797 - DNA, 300 bp, unidentified
  misc_feature 1..300: note = Ascusbbf_1821B, encodes 16S rRNA
  source 1..300: mol_type = genomic DNA
agagtttgatcatggctcaggatgaacgctagctacaggcttaacacatgcaagtcgaggggcagcacggagactgcttgcagtctctggtggcgaccggcggatgggtgagtaacgcgtatccaacctgcccgtgacccggggacagccttccgaaaggaagattaatacccgatgttccggcgtgcgcgcatgcgctgcgccggcaaagtttttctgcggtgacggatggggatgcgtctgattaggcagcaggcggggtaacggcccacctggccatcgatcagtaggggttctgag

SEQ ID NO: 10798 - DNA, 300 bp, unidentified
  misc_feature 1..300: note = Ascusbbf_1821C, encodes 16S rRNA
  source 1..300: mol_type = genomic DNA
agagtttgatcatggctcaggatgaacgctagctacaggcttaacacatgcaagtcgaggggcagcacggagactgcttgcagtctctggtggcgaccggcggatgggcgagtaacgcgtatccaacctgcccgtgacccggggacagccttccgaaaggaagattaatacccgatgttccggcgtgcgcgcatgcgctgcgccggcaaagtttttctgcggtgacggatggggatgcgtctgattaggcagcaggcggggtaacggcccacctggccatcgatcagtaggggttctgag

SEQ ID NO: 10799 - DNA, 300 bp, unidentified
  misc_feature 1..300: note = Ascusbbf_1821D, encodes 16S rRNA
  source 1..300: mol_type = genomic DNA
agagtttgatcctggctcaggatgaacgctagctacaggcttaacacatgcaagtcgaggggcagcacggagactgcttgcagtctctggtggcgaccggcggatgggtgagtaacgcgtatccaacctgcccgtgacccggggacagccttccgaaaggaagattaatacccgatgttccggcgtgcgcgcatgcgctgcgccggcaaagtttttctgcggtgacggatggggatgcgtctgattaggcagcaggcggggtaacggcccacctggccatcgatcagtaggggttctgag

SEQ ID NO: 10800 - DNA, 300 bp, unidentified
  misc_feature 1..300: note = Ascusbbf_56782A, encodes 16S rRNA
  source 1..300: mol_type = genomic DNA
agagtttgatcatggctcaggatgaacgctagctacaggcttaacacatgcaagtcgaggggcagcatgatcgaagcttgctttgattgatggcgaccggcgcacgggtgagtaacgcgtatccaaccttccctatagtagagaatagcccggcgaaagtcggattaatgctctatgttgtatttagaggacatctgaagaataccaaaggtttaccgctataggatggggatgcgtctgattaggtagtaggcggggtaacggcccacctagccgacgatcagtaggggttctgagagg

SEQ ID NO: 10801 - DNA, 300 bp, unidentified
  misc_feature 1..300: note = Ascusbbf_56782B, encodes 16S rRNA
  source 1..300: mol_type = genomic DNA
agagtttgatcatggctcaggatgaacgctagctacaggcttaacacatgcaagtcgaggggcagcatgatcaaagcttgctttgattgatggcgaccggcgcacgggtgagtaacgcgtatccaaccttccctatagtagtggatagcccggcgaaagtcggattaatacactatgttgtatttagaggacatctgaagaataccaaaggtttaccgctataggatggggatgcgtctgattagatagtaggcggggtaacggcccacctagtcgacgatcagtaggggttctgagagg

SEQ ID NO: 10802 - DNA, 300 bp, unidentified
  misc_feature 1..300: note = Ascusbbf_56782C, encodes 16S rRNA
  source 1..300: mol_type = genomic DNA
agagtttgatcatggctcaggatgaacgctagctacaggcttaacacatgcaagtcgaggggcagcatgatcaaagcttgctttgattgatggcgaccggcgcacgggtgagtaacgcgtatccaaccttccctatagtagtggatagcccggcgaaagtcggattaatacactatgttgtatttagaggacatctgaagaataccaaaggcttgccgctataggatggggatgcgtctgattagatagtaggcggggtaacggcccacctagtcgacgatcagtaggggttctgagagg

SEQ ID NO: 10803 - DNA, 300 bp, unidentified
  misc_feature 1..300: note = Ascusbbf_92A, encodes 16S rRNA
  source 1..300: mol_type = genomic DNA
agagtttgatcctggctcaggatgaacgctggcggcgcgcctaacacatgcaagtcgaacggccggacccacctcggtgggcgaggcagtggcgaacggctgagtaacacgtgggcaacctgcccccctccccgggacagcctcgggaaaccgtgggtaataccggatatgccgccccctccgcatgggaggggcgggaaagctccggcggggggggatgggcccgcggcctgttagcttgttggcggggcaacggcccaccaaggcgactatgggtagctgggttgagagaccgaccag

SEQ ID NO: 10804 - DNA, 300 bp, unidentified
  misc_feature 1..300: note = Ascusbbf_92B, encodes 16S rRNA
  source 1..300: mol_type = genomic DNA
agagtttgatcctggctcaggatgaacgctggcggcgcgcctaacacatgcaagtcgaacggccggacccaccccggtgggcgaggcagtggcgaacggctgagtaacacgtgggcaacctgcccccctccccgggacagcctcgggaaaccgtgggtaataccggatgagccgccccctccgcatgggaggggcgggaaagctccggcggggggggatgggcccgcggcctgttagctagttggcggggcaacggcccaccaaggcgactatgggtagctgggttgagagaccgaccag

SEQ ID NO: 10805 - DNA, 300 bp, unidentified
  misc_feature 1..300: note = Ascusbbf_92C, encodes 16S rRNA
  source 1..300: mol_type = genomic DNA
agagtttgatcatggctcaggatgaacgctggcggcgcgcctaacacatgcaagtcgaacggccggacccacctcggtgggcgaggcagtggcgaacggctgagtaacacgtgggcaacctgcccccctccccgggacagcctcgggaaaccgtgggtaataccggatactccgccccctccgcatgggaggggcgggaaagctccggcggggggggatgggcccgcggcctgttagctagttggcggggcaacggcccaccaaggcgactatgggtagctgggttgagagaccgaccag

SEQ ID NO: 10806 - DNA, 300 bp, unidentified
  misc_feature 1..300: note = Ascusbbf_92D, encodes 16S rRNA
  source 1..300: mol_type = genomic DNA
agagtttgatcctggctcaggatgaacgctggcggcgcgcctaacacatgcaagtcgaacggccggacccacctcggtgggcgaggcagtggcgaacggctgagtaacacgtgggcaacctgcccccctccccgggacagcctcgggaaaccgtgggtaataccggatactccgccccctccgcatgggaggggcgggaaagctccggcggggggggatgggcccgcggcctgttagctagttggcggggcaacggcccaccaaggcgactatgggtagctgggttgagagaccgaccag

SEQ ID NO: 10807 - DNA, 300 bp, unidentified
  misc_feature 1..300: note = Ascusbbf_92E, encodes 16S rRNA
  source 1..300: mol_type = genomic DNA
agagtttgatcctggctcaggatgaacgctggcggcgcgcctaacacatgcaagtcgaacggccggacccacctcggtgggcgaggcagtggcgaacggctgagtaacacgtgggcaacctgcccccctccccgggacagcctcgggaaaccgtgggtaataccggatatgccgccccctccgcatgggaggggcgggaaagctccggcggggggggatgggcccgcggcctgttagctagttggcggggcaacggcccaccaaggcgactatgggtagctgggttgagagaccgaccag

SEQ ID NO: 10808 - DNA, 300 bp, unidentified
  misc_feature 1..300: note = Ascusbbf_92F, encodes 16S rRNA
  source 1..300: mol_type = genomic DNA
agagtttgatcatggctcaggatgaacgctggcggcgcgcctaacacatgcaagtcgaacggccggacccaccccggtgggcgaggcagtggcgaacggctgagtaacacgtgggcaacctgcccccctccccgggacagcctcgggaaaccgtgggtaataccggatgagccgccccctccgcatgggaggggcgggaaagctccggcggggggggatgggcccgcggcctgttagctagttggcggggcaacggcccaccaaggcgactatgggtagctgggttgagagaccgaccag

SEQ ID NO: 10809 - DNA, 300 bp, unidentified
  misc_feature 1..300: note = Ascusbbf_92H, encodes 16S rRNA
  source 1..300: mol_type = genomic DNA
agagtttgataatggctcgggatgaacgctggcggcgcgcctaacacatgcaagtcgaacggccggacccaccccggtgggcgaggcagtggcgaacggctgagtaacacgtgggcaacctgcccccctccccgggacagcctcgggaaaccgtgggtaataccggatgaaccgccccctccgcatgggaggggcgggaaagctccggcggggggggatgggcccgcggcctgttagctagttggcggggcaacggcccaccaaggtgactatgggtagctgggttgagagaccgaccag

SEQ ID NO: 10810 - DNA, 301 bp, unidentified; identical to SEQ ID NO: 10606
  misc_feature 1..301: note = Ascusbbf_92K, encodes 16S rRNA
  source 1..301: mol_type = genomic DNA

SEQ ID NO: 10811 - DNA, 300 bp, unidentified
  misc_feature 1..300: note = Ascusbbf_92L, encodes 16S rRNA
  source 1..300: mol_type = genomic DNA
agagtttgatcatggctcaggatgaacgctggcggcgcgcctaacacatgcaagtcgaacggccggacccacctcggtgggcgaggcagtggcgaacggctgagtaacacgtgggcaacctgcccccctccccgggacagcctcgggaaaccgtgggtaataccggatactccgccccctccgcatgggaggggcgggaaagctccggcggggggggatgggcccgcggcctgttagctagttggcggggcaacggcccaccaaggcgactatgggtagccggcctgagagggcggacgg

SEQ ID NO: 10812 - DNA, 300 bp, unidentified
  misc_feature 1..300: note = Ascusbbf_118A, encodes 16S rRNA
  source 1..300: mol_type = genomic DNA
agagtttgatcctggctcaggatgaacgctagctacaggcttaacacatgcaagtcgaggggcagcatgatttgtgcttgcacagattaatggcgaccggcgcacgggtgagtaacgcgtatccaaccttccctgtactagaggatagcccggcgaaagtcggattaatactctatgttgttcaatgcggacatctaagttgaaccaaaggtttaccggtataggatggggatgcgtctgattaggttgttggcggggtaacggcccaccaagcctacgatcagtaggggttctgagagg

SEQ ID NO: 10813 - DNA, 300 bp, unidentified
  misc_feature 1..300: note = Ascusbbf_118B, encodes 16S rRNA
  source 1..300: mol_type = genomic DNA
agagtttgatcatggctcaggatgaacgctagctacaggcttaacacatgcaagtcgaggggcagcatgatttgtgcttgcacagattgatggcgaccggcgcacgggtgagtaacgcgtatccaaccttccctatactagaggatagcccggcgaaagtcggattaatactctatgttgttcaatgcggacatctaagttgaaccaaaggtttaccggtataggatggggatgcgtctgattaggttgttggcggggtaacggcccaccaagcctacgatcagtaggggttctgagagg

SEQ ID NO: 10814 - DNA, 300 bp, unidentified
  misc_feature 1..300: note = Ascusbbf_118C, encodes 16S rRNA
  source 1..300: mol_type = genomic DNA
agagtttgatcctggctcaggatgaacgctagctacaggcttaacacatgcaagtcgaggggcagcatgatttgtgcttgcacagattgatggcgaccggcgcacgggtgagtaacgcgtatccaaccttccctatactagaggatagcccggcgaaagtcggattaatactctatgttgttcaatgcggacatctaagttgaaccaaaggtttaccggtataggatggggatgcgtctgattaggttgttggcggggtaacggcccaccaagcctacgatcagtaggggttctgagagg

SEQ ID NO: 10815 - DNA, 300 bp, unidentified
  misc_feature 1..300: note = Ascusbbf_5429A, encodes 16S rRNA
  source 1..300: mol_type = genomic DNA
agagtttgatcctggctcagattgaacgctggcggcaggcttaacacatgcaagtcgtacggtaacagagggaagcttgcttctctgctgacgagtggcggacgggtgagtaatgtctgggaagctgcctgcttgagggggatagcggagcgaaagttccgataataccgcgtaagcccgagaggggaaagtgcgggaccgcaaggccgcacgcgagcagatgcgcccagatgggattaggcagttggggaggtaacggctcaccaaaccgatgatctctagctggtttgagaggacaat

SEQ ID NO: 10816 - DNA, 300 bp, unidentified
  misc_feature 1..300: note = Ascusbbf_5429B, encodes 16S rRNA
  source 1..300: mol_type = genomic DNA
agagtttgatcatggctcagattgaacgctggcggcaggcttaacacatgcaagtcgtacggtaacagagggaagcttgcttctctgctgacgagtggcggacgggtgagtaatgtctgggaagctgcctgcttgagggggatagcggagcgaaagttccgataataccgcgtaagcccgagaggggaaagtgcgggaccgcaaggccgcacgcgagcagatgcgcccagatgggattaggcagttggggaggtaacggctcaccaaaccgatgatctctagctggtttgagaggacaat

SEQ ID NO: 10817 - DNA, 300 bp, unidentified; identical to SEQ ID NO: 10816
  misc_feature 1..300: note = Ascusbbf_5429C, encodes 16S rRNA
  source 1..300: mol_type = genomic DNA

SEQ ID NO: 10818 - DNA, 301 bp, unidentified
  misc_feature 1..301: note = Ascusbbf_5429D, encodes 16S rRNA
  source 1..301: mol_type = genomic DNA
agagtttgatcctggctcagattgaacgctggcggcaggcctaatacatgcaagtcgaacggcagcagggggagtgcttgcactccccgctggcgagtggcggacgggtgagtagtgcctgggaagctgcctggcagagggggacaacagctggaaacggctgctgataccgcatattaccccgagggggaaaggagagatccgctgccggatgcgcccaggcgggattagctggttggcggggcaaaggcccaccaaggcgacgatccctagctggtctgagaggatgatcagccacatt

SEQ ID NO: 10819 - DNA, 300 bp, unidentified
  misc_feature 1..300: note = Ascusbbf_3A, encodes 16S rRNA
  source 1..300: mol_type = genomic DNA
agagtttgatcctggctcagattgaacgctggcggcaggcttaacacatgcaagtcgtacggtaacagagggaagcttgcttctctgctgacgagtggcggacgggtgagtaatgtctgggaagctgcctgcttgagggggatagcggagcgaaagttccgataataccgcgtaagcccgagaggggaaagtgcgggaccgcaaggccgcacgcgagcagatgcgcccagatgggattaggcagttggggaggtaatggctcaccaaaccgatgatctctagctggtttgagaggacaat

SEQ ID NO: 10820 - DNA, 300 bp, unidentified; identical to SEQ ID NO: 10815
  misc_feature 1..300: note = Ascusbbf_3B, encodes 16S rRNA
  source 1..300: mol_type = genomic DNA

SEQ ID NO: 10821 - DNA, 300 bp, unidentified
  misc_feature 1..300: note = Ascusbbf_3C, encodes 16S rRNA
  source 1..300: mol_type = genomic DNA
agagtttgatcatggctcagattgaacgctggcggcaggcttaacacatgcaagtcgtacggtaacagagggaagcttgcttctctgctgacgagtggcggacgggtgagtaatgtctgggaagctgcctgcttgagggggatagcggagcgaaagttccgataataccgcgtaagcccgagaggggaaagtgcgggaccgcaaggccgcacgcgagcagatgcgcccagatgggattaggcagttggggaggtaatggctcaccaaaccgatgatctctagctggtttgagaggacaat

SEQ ID NO: 10822 - DNA, 300 bp, unidentified
  misc_feature 1..300: note = Ascusbbf_3D, encodes 16S rRNA
  source 1..300: mol_type = genomic DNA
agagtttgatcctggctcagattgaacgctggcggcaggcttaacacatgcaagtcgtacggtaacagagggaagcttgcttctctgctgacgagtggcggacgggtgagtaatgtctgggaagctgcctgcttgagggggatagcggagcgaaagttccgataataccgcgtaagcccgagaggggaaagtgcgggaccgcaaggccgcacgcgagcagatgcgcccagatgggattaggcagttggggaggtaacggctcaccaaaccgatgatccatagccggcctgagagggtgaa

SEQ ID NO: 10823 - DNA, 300 bp, unidentified; identical to SEQ ID NO: 10816
  misc_feature 1..300: note = Ascusbbf_3E, encodes 16S rRNA
  source 1..300: mol_type = genomic DNA

SEQ ID NO: 10824 - DNA, 300 bp, unidentified; identical to SEQ ID NO: 10816
  misc_feature 1..300: note = Ascusbbf_3F, encodes 16S rRNA
  source 1..300: mol_type = genomic DNA

SEQ ID NO: 10825 - DNA, 299 bp, unidentified
  misc_feature 1..299: note = Ascusbbf_3G, encodes 16S rRNA
  source 1..299: mol_type = genomic DNA
agagtttgatcctggctcagattgaacgctggcggcaggcctaacacatgcaagtcgaacggtaacaggaagaagcttgcttctctgctgacgagtggcggacgggtgagtaatgtctgggaagctgcctgcttgagggggatagcggagcgaaagttccgataataccgcgtaagcccgagaggggaaagtgcgggaccgcaaggccgcacgcgagcagatgcgcccagatgggattaggcagttggggaggtaacggctcaccaaaccgatgatctctagctggtttgagaggacga

SEQ ID NO: 10826 - DNA, 300 bp, unidentified
  misc_feature 1..300: note = Ascusbbf_10576A, encodes 16S rRNA
  source 1..300: mol_type = genomic DNA
agagtttgatcctggctcaggatgaacgctagctacaggcttaacacatgcaagtcgaggggcagcatgacgatagcttgctattgtcgatggcgaccggcgcacgggtgagtaacgcgtatccaaccttccccatagtagggcatagcccgtagaaatgcggattaataccctatgttttccgaagcagacatctaatttggaacaaaggttcaccgctatgggatggggatgcgtctgattaggttgttggcggggtaacggcccaccaagccatcgatcagtaggggttctgagagg

SEQ ID NO: 10827 - DNA, 301 bp, unidentified; identical to SEQ ID NO: 10606
  misc_feature 1..301: note = Ascusbbf_10576B, encodes 16S rRNA
  source 1..301: mol_type = genomic DNA

SEQ ID NO: 10828 - DNA, 300 bp, unidentified
  misc_feature 1..300: note = Ascusbbf_10576C, encodes 16S rRNA
  source 1..300: mol_type = genomic DNA
agagtttgatcctggctcaggatgaacgctagctacaggcttaacacatgcaagtcgaggggcagcatgacgatagcttgctattgtcgatggcgaccggcgcacgggtgagtaacgcgtatccaaccttccccatagtagggcatagcccgtagaaatgcggattaataccctatgttttccgaagcagacatctaattcggaacaaaggttcaccgctatgggatggggatgcgtctgattaggttgttggcggggtaacggcccaccaagccatcgatcagtaggggttctgagagg

SEQ ID NO: 10829 - DNA, 301 bp, unidentified
  misc_feature 1..301: note = Ascusbbf_10576D, encodes 16S rRNA
  source 1..301: mol_type = genomic DNA
agagtttgatcctggctcaggatgaacgctagctacaggcttaacacatgcaagtcgaggggcagcatgacgatagcttgctattgtcgatggcgaccggcgcacgggtgagtaacgcgtatccaaccttccccatagtagggcatagcccgtagaaatgcggattaataccctatgttttccgaagcagacatctaatttggaacaaaggttcaccgctatgggatggggatgcgtctgattaggttgcaggcggggtaacggcccacctggccatcgatcagtaggggttctgagagga

SEQ ID NO: 10830 - DNA, 300 bp, unidentified
  misc_feature 1..300: note = Ascusbbf_10576E, encodes 16S rRNA
  source 1..300: mol_type = genomic DNA
agagtttgatcatggctcaggatgaacgctagctacaggcttaacacatgcaagtcgaggggcagcatgacgatagcttgctatcgtcgatggcgaccggcgcacgggtgagtaacgcgtatccaaccttccccatagtagggcatagcccgtagaaatgcggattaataccctatgttttccgaagcagacatctaatttggaacaaaggttcaccgctatgggatggggatgcgtctgattaggttgttggcggggtaacggcccaccaagccttcgatcagtaggggttctgagagg

SEQ ID NO: 10831 - DNA, 300 bp, unidentified
  misc_feature 1..300: note = Ascusbbf_729A, encodes 16S rRNA
  source 1..300: mol_type = genomic DNA
agagtttgatcctggctcaggatgaacgctagctacaggcttaacacatgcaagtcgaggggcatcagggtctgtgcttgcacagattgctggcgaccggcgcacgggtgagtaacgcgtatccaaccttccccttagtagaggatagcccggcgaaagtcggattaatactctatgttgttcaatgcggacatctaagttgaaccaaaggtttaccgctaagggatggggatgcgtctgattaggtagtaggcggggtaacggcccacctagccgacgatcagtaggggttctgagagg

SEQ ID NO: 10832 - DNA, 300 bp, unidentified
  misc_feature 1..300: note = Ascusbbf_729B, encodes 16S rRNA
  source 1..300: mol_type = genomic DNA
agagtttgatcctggctcaggatgaacgctagctacaggcttaacacatgcaagtcgaggggcatcagggtctgtgcttgcacagattgctggcgaccggcgcacgggtgagtaacgcgtatccaaccttccccttagtagaggatagcccggcgaaagtcggattaatactctatgttgttcaatgcggacatctaagttgaaccaaaggtttaccgctaagggatggggatgcgtctgattaggtagtaggcggggtaacggcccacctagccaacgatcagtaggggttctgagagg

SEQ ID NO: 10833 - DNA, 300 bp, unidentified
  misc_feature 1..300: note = Ascusbbf_729C, encodes 16S rRNA
  source 1..300: mol_type = genomic DNA
agagtttgatcatggctcaggatgaacgctagctacaggcttaacacatgcaagtcgaggggcatcaggatctgtgcttgcacagattgctggcgaccggcgcacgggtgagtaacgcgtatccaaccttccccttagtagaggatagcccggcgaaagtcggattaatactctatgttgttcaatgcggacatctaagttgaaccaaaggtttaccgctaagggatggggatgcgtctgattaggtagtaggcggggtaacggcccacctagccaacgatcagtaggggttctgagagg

SEQ ID NO: 10834 - DNA, 300 bp, unidentified
  misc_feature 1..300: note = Ascusbbf_729D, encodes 16S rRNA
  source 1..300: mol_type = genomic DNA
agagtttgatcctggctcaggatgaacgctagctacaggcttaacacatgcaagtcgaggggcatcagggtctgtgcttgcacagattgctggcgaccggcgcacgggtgagtaacgcgtatccaaccttccccttagtagaggatagcccggcgaaagtcggattaatactctatgttgttcaatgcggacatctaagttgaaccaaaggtttaccgctaagggatggggatgcgtctgattaggttgttggcggggtaacggcccaccaagcctacgatcagtaggggttctgagagg

SEQ ID NO: 10835 - DNA, 300 bp, unidentified
  misc_feature 1..300: note = Ascusbbf_729E, encodes 16S rRNA
  source 1..300: mol_type = genomic DNA
agagtttgatcatggctcaggatgaacgctagctacaggcttaacacatgcaagtcgaggggcatcaggatctgtgcttgcacagattgctggcgaccggcgcacgggtgagtaacgcgtatccaaccttccccttagtagaggatagcccggcgaaagtcggattaatactctatgttgttcaatgcggacatctaagttgaaccaaaggcttgccgctaagggatggggatgcgtctgattaggttgttggcggggtaacggcccaccaagccatcgatcagtaggggttctgagagg

SEQ ID NO: 10836 - DNA, 300 bp, unidentified
  misc_feature 1..300: note = Ascusbbf_729F, encodes 16S rRNA
  source 1..300: mol_type = genomic DNA
agagtttgatcatggctcaggatgaacgctagctacaggcttaacacatgcaagtcgaggggcatcaggatttgtgcttgcacagattgctggcgaccggcgcacgggtgagtaacgcgtatccaaccttccccttagtagaggatagcccggcgaaagtcggattaatactctatgttgttcaatgcggacatctaagttgaaccaaaggtttaccgctaagggatggggatgcgtctgattaggtagtaggcggggtaacggcccacctagccaacgatcagtaggggttctgagagg

SEQ ID NO: 10837 - DNA, 300 bp, unidentified; identical to SEQ ID NO: 10519
  misc_feature 1..300: note = Ascusbbf_201A, encodes 16S rRNA
  source 1..300: mol_type = genomic DNA

SEQ ID NO: 10838 - DNA, 300 bp, unidentified
  misc_feature 1..300: note = Ascusbbf_201B, encodes 16S rRNA
  source 1..300: mol_type = genomic DNA
agagtttgatcctggctcaggatgaacgctagctacaggcttaacacatgcaagtcgaggggcagcataacgaaagcttgcttttgttgatggcgaccggcgcacgggtgagtaacgcgtatccaaccttccctatactagagaatagcccggcgaaagtcggattaatgctctatgttcttctttgatggcatctgacgagaagcaaaggtttaccggtataggatggggatgcgtctgattaggttgttggcggggtaacggcccaccaagcctgcgatcagtaggggttctgagagg

SEQ ID NO: 10839 - DNA, 300 bp, unidentified
  misc_feature 1..300: note = Ascusbbf_201C, encodes 16S rRNA
  source 1..300: mol_type = genomic DNA
agagtttgatcctggctcaggatgaacgctagctacaggcttaacacatgcaagtcgaggggcagcataacgaaagcttgcttttgttgatggcgaccggcgcacgggtgagtaacgcgtatccaaccttccctatactagagaatagcccggcgaaagtcggattaatgctctatgttcttctttgatggcatctgacgagaagcaaaggtttaccggtataggatggggatgcgtctgattaggttgttggcggggtaacggcccaccaagcctacgatcagtaggggttctgagagg

SEQ ID NO: 10840 - DNA, 300 bp, unidentified; identical to SEQ ID NO: 10519
  misc_feature 1..300: note = Ascusbbf_201D, encodes 16S rRNA
  source 1..300: mol_type = genomic DNA

SEQ ID NO: 10841 - DNA, 300 bp, unidentified
  misc_feature 1..300: note = Ascusbbf_201E, encodes 16S rRNA
  source 1..300: mol_type = genomic DNA
agatttgatcatggctcaggatgaacgctagctacaggcttaacacatgcaagtcgaggggcagcatatagatagcttgctatttatgatggcgaccggcgcacgggtgagtaacgcgtatccaaccttccctatactagagaatagcccggcgaaagtcggattaatgctctatgttcttctttgatggcatctgacgagaagcaaaggtttaccggtataggatggggatgcgtctgattaggttgttggcggggtaacggcccaccaagcctacgatcagtaggggttctgagagga

SEQ ID NO: 10842 - DNA, 300 bp, unidentified
  misc_feature 1..300: note = Ascusbbf_201F, encodes 16S rRNA
  source 1..300: mol_type = genomic DNA
agagtttgatcatggctcaggatgaacgctagctacaggcttaacacatgcaagtcgaggggcagcatatagatagcttgctatttatgatggcgaccggcgcacgggtgagtagcgcgtatccaaccttccctatactagagaatagcccggcgaaagtcggattaatgctctatgttcttctttgatggcatctgacgagaagcaaaggtttaccggtataggatggggatgcgtctgattaggttgttggcggggtaacggcccacctaaccgacgatcagtaggggttctgagagg

SEQ ID NO: 10843 - DNA, 300 bp, unidentified
  misc_feature 1..300: note = Ascusbbf_201G, encodes 16S rRNA
  source 1..300: mol_type = genomic DNA
agagtttgatcatggctcaggatgaacgctagctacaggcttaacacatgcaagtcgaggggcagcataacgaaagcttgcttttgttgatggcgaccggcgcacgggtgagtaacgcgtatccaaccttccctatactagagaatagcccggcgaaagtcggattaatgctctatgttcttctttgatggcatctgacgagaagcaaaggtttaccggtataggatggggatgcgtctgattaggtcgttggcggggtaacggcccaccaagcctacgatcagtaggggttctgagagg

SEQ ID NO: 10844 - DNA, 300 bp, unidentified; identical to SEQ ID NO: 10839
  misc_feature 1..300: note = Ascusbbf_201H, encodes 16S rRNA
  source 1..300: mol_type = genomic DNA

SEQ ID NO: 10845 - DNA, 301 bp, unidentified
  misc_feature 1..301: note = Ascusbbf_201I, encodes 16S rRNA
  source 1..301: mol_type = genomic DNA
agagtttgatcctggctcaggatgaacgctagctacaggcttaacacatgcaagtcgaggggcagcatgaagatgtgcttgcacaactttgatggcgaccggcgcacgggtgagtaacgcgtatccaaccttccctatactagagaatagcccggcgaaagtcggattaatgctctatgttcttctttgatggcatctgacgagaagcaaaggtttaccggtataggatggggatgcgtctgattaggttgttggcggggtaacggcccaccaagcctacgatcagtaggggttctgagag

SEQ ID NO: 10846 - DNA, 300 bp, unidentified; identical to SEQ ID NO: 10680
  misc_feature 1..300: note = Ascusbbf_416A, encodes 16S rRNA
  source 1..300: mol_type = genomic DNA

SEQ ID NO: 10847 - DNA, 300 bp, unidentified
  misc_feature 1..300: note = Ascusbbf_416B, encodes 16S rRNA
  source 1..300: mol_type = genomic DNA
agagtttgatcctggctcaggatgaacgctagctacaggcttaacacatgcaagtcgaggggcatcatggagtttgcttgcaaactctgatggcgaccggcgcacgggtgagtaacgcgtatccaaccttccctatagtagaggatagcccggcgaaagtcggattaatactctatgttttccgttgcagacatctaagatggaacaaaggcttgccgctataggatggggatgcgtctgattaggtagtcggcggggtaacggcccaccgagccttcgatcagtaggggttctgagagg

SEQ ID NO: 10848 - DNA, 300 bp, unidentified
  misc_feature 1..300: note = Ascusbbf_416C, encodes 16S rRNA
  source 1..300: mol_type = genomic DNA
agagtttgatcctggctcaggatgaacgctagctacaggcttaacacatgcaagtcgaggggcatcatggagtttgcttgcaaactctgatggcgaccggcgcacgggtgagtaacgcgtatccaaccttccctatagtagaggatagcccggcgaaagtcggattaatactctatgttttccgttgcagacatctaagatggaacaaaggcttgccgctataggatggggatgcgtctgattaggtagtcggcggggtaacggcccaccgagccatcgatcagtaggggttctgagagg

SEQ ID NO: 10849 - DNA, 301 bp, unidentified
  misc_feature 1..301: note = Ascusbbf_416D, encodes 16S rRNA
  source 1..301: mol_type = genomic DNA
agagtttgatcatggctcaggatgaacgctagctacaggcttaacacatgcaagtcgaggggcagcatgaagtttgcttgcaaactttgatggcgaccggcgcacgggtgagtaacgcgtatccaaccttccctatagtagaggatagcccggcgaaagtcggattaatactctatgttttccaatgcagacatctaaaatggaacaaaggtttaccgctataggatggggatgcgtctgattaggtagtcggcggggtaacggcccaccgagccatcgatcagtaggggttctgagagga

SEQ ID NO: 10850 - DNA, 301 bp, unidentified
  misc_feature 1..301: note = Ascusbbf_416E, encodes 16S rRNA
  source 1..301: mol_type = genomic DNA
agagtttgatcctggctcaggatgaacgctagctacaggcttaacacatgcaagtcgaggggcagcatgaagtttgcttgcaaactttgatggcgaccggcgcacgggtgagtaacgcgtatccaaccttccctatagtagaggatagcccggcgaaagtcggattaatactctatgttttccaatgcagacatctaaaatggaacaaaggtttaccgctataggatggggatgcgtctgattaggtagtcggcggggtaacggcccaccgagccatcgatcagtaggggttctgagagga

SEQ ID NO: 10851 - DNA, 300 bp, unidentified
  misc_feature 1..300: note = Ascusbbf_416F, encodes 16S rRNA
  source 1..300: mol_type = genomic DNA
agagtttgatcatggctcaggatgaacgctagctacaggcttaacacatgcaagtcgaggggcatcatggagtttgcttgcaaactctgatggcgaccggcgcacgggtgagtaacgcgtatccaaccttccctatagtagaggatagcccggcgaaagtcggattaatactctatgttttccgttgcagacatctaagatggaacaaaggcttgccgctataggatggggatgcgtctgattaggtagtcggcggggtaacggcccaccgagccttcgatcagtaggggttctgagagg

SEQ ID NO: 10852 - DNA, 300 bp, unidentified
  misc_feature 1..300: note = Ascusbbf_416G, encodes 16S rRNA
  source 1..300: mol_type = genomic DNA
agagtttgatcctggctcaggatgaacgctagctacaggcttaacacatgcaagtcgaggggcatcatggagtttgcttgcaaactctgatggcgaccggcgcacgggtgagtaacgcgtatccaaccttccctatagtagaggatagcccggcgaaagtcggattaatactctatgttttccgttgcagacatctaagatggaacaaaggcttgccgctataggatggggatgcgtctgattaggttgttggcggggtaacggcccaccaagccttcgatcagtaggggttctgagagg

SEQ ID NO: 10853 - DNA, 300 bp, unidentified
  misc_feature 1..300: note = Ascusbbf_15806A, encodes 16S rRNA
  source 1..300: mol_type = genomic DNA
agagtttgatcctggctcaggatgaacgctagctacaggcttaacacatgcaagtcgaggggcagcatgatcttagcttgctaagattgatggcgaccggcgcacgggtgagtaacgcgtatccaaccttccctatagtagaggatagcccggcgaaagtcggattaatactctatgttttccgttgcagacatctaaaatggaacaaaggtttaccgctataggatggggatgcgtctgattaggttgttggcggggtaacggcccaccaagccttcgatcagtaggggttctgagagg

SEQ ID NO: 10854 - DNA, 300 bp, unidentified
  misc_feature 1..300: note = Ascusbbf_15806B, encodes 16S rRNA
  source 1..300: mol_type = genomic DNA
agagtttgatcctggctcaggatgaacgctagctacaggcttaacacatgcaagtcgaggggcagcatgacgatagcttgctattgttgatggcgaccggcgcacgggtgagtaacgcgtatccaaccttccctatagtagaggatagcccggcgaaagtcggattaatactctatgttttccaatgcagacatctaaaatggaacaaaggtttaccgctataggatggggatgcgtctgattaggttgttggcggggtaacggcccaccaagcctacgatcagtaggggttctgagagg

SEQ ID NO: 10855 - DNA, 299 bp, unidentified
  misc_feature 1..299: note = Ascusbbf_6115A, encodes 16S rRNA
  source 1..299: mol_type = genomic DNA
agagtttgatcctggctcaggatgaacgctggcggcgtgcctaacacatgcaagtcgaacggaaatgtttagatgaagttttcggatggattcttttcattttagtggcggacgggtgagtaacacgtgggtaacctgccctgtaccgggggataacacttagaaataggtgataataccgcataagcgcacactgacgcatgtcagagtgtgaaaaactccggtggtacaggatggacccgcgtctgattagcttgttggcggggtaacggcccaccaaggcgacgatcagtagccgg

SEQ ID NO: 10856 - DNA, 299 bp, unidentified
  misc_feature 1..299: note = Ascusbbf_6115B, encodes 16S rRNA
  source 1..299: mol_type = genomic DNA
agagtttgatcatggctcaggatgaacgctggcggcgtgcctaacacatgcaagtcgaacggaaatgttttgatgaagatttcggttggattcatttcattttagtggcggacgggtgagtaacacgtgggtaacctgccctgtaccgggggataacacttagaaataggtgataataccgcataagcgcacactgacgcatgtcagagtgtgaaaaactccggtggtacaggatggacccgcgtctgattagcttgttggcggggtaacggcccaccaaggcgacgatcagtagccgg

SEQ ID NO: 10857 - DNA, 299 bp, unidentified
  misc_feature 1..299: note = Ascusbbf_6115C, encodes 16S rRNA
  source 1..299: mol_type = genomic DNA
agagtttgatcctggctcaggatgaacgctggcggcgtgcctaacacatgcgagtcgaacggaaatgtttagatgaagttttcggatggattcttttcattttagtggcggacgggtgagtaacacgtgggtaacctgccctgtaccgggggataacacttagaaataggtgataataccgcataagcgcacactgacgcatgtcagagtgtgaaaaactccggtggtacaggatggacccgcgtctgattagcttgttggcggggtaacggcccaccaaggcgacgatcagtagccgg

SEQ ID NO: 10858 - DNA, 299 bp, unidentified
  misc_feature 1..299: note = Ascusbbf_6115D, encodes 16S rRNA
  source 1..299: mol_type = genomic DNA
agagtttgatcctggctcaggatgaacgctggcggcgtgcctaacacatgcaagtcgaacggaaatgttttgatgaagatttcggttggattcatttcattttagtggcggacgggtgagtaacacgtgggtaacctgccctgtaccgggggataacacttagaaataggtgataataccgcataagcgcacactgacgcatgtcagagtgtgaaaaactccggtggtacaggatggacccgcgtctgattagcttgttggcggggtaacggcccaccaaggcgacgatcagtagccgg

SEQ ID NO: 10859 - DNA, 301 bp, unidentified
  misc_feature 1..301: note = Ascusbbf_1325058A, encodes 16S rRNA
  source 1..301: mol_type = genomic DNA
agagtttgatcctggctcaggacgaacgctggcggcgtgcttaacacatgcaagtcgaacggggcgaagaggagcttgctcttcctagcctagtggcaaacgggtgagtaacgcgtaggcaacctgcccttcagatggggacaacatttcgaaaggaatgctaataccgaatgacgtgcattggtcgcatgaccgatgtaccaaaggccgggcaaccggtcactgaaggatgggcctgcgtctgattagctagttggtggggtaacggctcaccaaggcgacgatcagtagccggtctgag

SEQ ID NO: 10860 - DNA, 301 bp, unidentified
  misc_feature 1..301: note = Ascusbbf_1325058B, encodes 16S rRNA
  source 1..301: mol_type = genomic DNA
agagtttgatcatggctcaggacgaacgctggcggcgtgcttaacacatgcaagtcgaacggggcgaagaggagcttgctcttcctagcttagtggcaaacgggtgagtaacgcgtaggcaacctgcccttcagatggggacaacatttcgaaaggaatgctaataccgaatgacgtgcattggtcgcatgaccgatgtaccaaaggccgggcaaccggtcactgaaggatgggcctgcgtctgattagctagttggtggggtaacggcccaccaaggcgacgatcagtagccggtctgag

SEQ ID NO: 10861 - DNA, 301 bp, unidentified
  misc_feature 1..301: note = Ascusbbf_1325058C, encodes 16S rRNA
  source 1..301: mol_type = genomic DNA
agagtttgatcatggctcaggaagaacgctggcggcgtgcttaacacatgcaagtcgaacggggcgaagaagagcttgctcttcctagcctagtggcaaacgggtgagtaacgcgtaggcaacctgcccttcagatggggacaacatttcgaaaggaatgctaataccgaatgaagtgcattggccgcatggccgatgcaccaaaggccgggcaaccggtcactgaaggatgggcctgcgtctgattagctagttggtggggtaacggcccaccaaggcgacgatcagtagccggtctgag

SEQ ID NO: 10862 - DNA, 301 bp, unidentified
  misc_feature 1..301: note = Ascusbbf_1325058D, encodes 16S rRNA
  source 1..301: mol_type = genomic DNA
agagtttgatcctggctcaggacgaacgctggcggcgtgcttaacacatgcaagtcgaacggggcgaagaggagcttgctcttcctagcctagtggcaaacgggtgagtaacgcgtaggcaacctgcccttcagatggggacaacatttcgaaaggaatgctaataccgaatgacgtgcattggtcgcatgaccgatgtaccaaaggccgggcaaccggtcactgaaggatgggcctgcgtctgattagctagttggtggggtaacggcccaccaaggcgacgatcagtagccggtctgag

SEQ ID NO: 10863 - DNA, 301 bp, unidentified
  misc_feature 1..301: note = Ascusbbf_1325058E, encodes 16S rRNA
  source 1..301: mol_type = genomic DNA
agagtttgatcctggctcaggacgaacgctggcggcgtgcttaacacatgcaagtcgaacggggcgaagaagagcttgctcttcctagcctagtggcaaacgggtgagtaacgcgtaggcaacctgcccttcagatggggacaacatttcgaaaggaatgctaataccgaatgaagtgcattggccgcatggccgatgcaccaaaggccgggcaaccggtcactgaaggatgggcctgcgtctgattagctagttggtggggtaacggcccaccaaggcgacgatcagtagccggtctgag

SEQ ID NO: 10864 - DNA, 301 bp, unidentified
  misc_feature 1..301: note = Ascusbbf_1325058F, encodes 16S rRNA
  source 1..301: mol_type = genomic DNA
agagtttgatcatggctcaggacgaacgctggcggcgtgcttaacacatgcaagtcgaacggggcgaagaagagcttgctcttcctagcctagtggcaaacgggtgagtaacgcgtaggcaacctgcccttcagatggggacaacatttcgaaaggaatgctaataccgaatgaagtgcattggccgcatggccgatgcaccaaaggccgggcaaccggtcactgaaggatgggcctgcgtctgattagctagttggtggggtaacggcccaccaaggcgacgatcagtagccggtctgag

SEQ ID NO: 10865 - DNA, 300 bp, unidentified
  misc_feature 1..300: note = Ascusbbf_28350A, encodes 16S rRNA
  source 1..300: mol_type = genomic DNA
agagtttgatcatggctcaggatgaacgctagctacaggcttaacacatgcaagtcgcggggtaacgagaggaaagcttgctttccttgtcgacgaccggcgcacgggtgagtaacgcgtatccaacctgcccattaccacgggatagcccgtcgaaaggcggattaataccgtatgaacttcatggatggcatctgatatgaagtaaaggtttagcggtaatggatggggatgcgtccgattagatagttggtgaggcaacggctcaccaagtcgacgatcggtaggggttctgagagg

SEQ ID NO: 10866 - DNA, 300 bp, unidentified
  misc_feature 1..300: note = Ascusbbf_28350B, encodes 16S rRNA
  source 1..300: mol_type = genomic DNA
agagtttgatcatggctcaggatgaacgctagctacaggcttaacacatgcaagtcgcggggtaacgagaggaaagcttgctttccttgtcgacgaccggcgcacgggtgagtaacgcgtatccaacctgcccattaccacgggatagcccgtcgaaaggcggattaataccgtatgaacttcatggatggcatctgatatgaagtaaaggtttagcggtaatggatggggatgcgtccgattagatagttggtgaggcaacggctcaccaagtcaacgatcggtaggggttctgagagg

SEQ ID NO: 10867 - DNA, 300 bp, unidentified
  misc_feature 1..300: note = Ascusbbf_28350C, encodes 16S rRNA
  source 1..300: mol_type = genomic DNA
agagtttgatcctggctcaggatgaacgctagctacaggcttaacacatgcaagtcgcggggtaacgagaggaaagcttgctttccttgtcgacgaccggcgcacgggtgagtaacgcgtatccaacctgcccattaccacgggatagcccgtcgaaaggcggattaataccgtatgaacttcatggatggcatctgatatgaagtaaaggtttagcggtaatggatggggatgcgtccgattagatagttggtgaggcaacggctcaccaagtcgacgatcggtaggggttctgagagg

SEQ ID NO: 10868 - DNA, 301 bp, unidentified
  misc_feature 1..301: note = Ascusbbf_372A, encodes 16S rRNA
  source 1..301: mol_type = genomic DNA
agagtttgatcctggctcaggatgaacgctagcgacaggcttaacacatgcaagtcgaggggcagcgggcgagtggcaacacttgctgtcggcgaccggcgcactggtgagtaacacgtatgcaacctgcccccttctgggagataacccatagaaatgtggcctaatatcccatagtcggtccagccgcatggccgggccgggaaaggcgagccggaaggggatgggcatgcggcgcattagctagttggcggggcagaggcccaccaaggcgacgatgcgtaggggttctgagaggaag

SEQ ID NO: 10869 - DNA, 299 bp, unidentified
  misc_feature 1..299: note = Ascusbbf_372B, encodes 16S rRNA
  source 1..299: mol_type = genomic DNA
agagtttgatcatggctcaggacgaacgctggcggcgtgcttaacacatgcaagtcgaggggcagcgggcgagtggcaacacttgctgtcggcgaccggcgcactggtgagtaacacgtatgcaacctgcccccttctgggagataacccatagagatgtggcctaatatcccatagtcggtccagccgcatggccgggccgggaaaggcgagccggaaggggatgggcatgcggcgcattagctagttggcggggcagaggcccaccaaggcgacgatgcgtaggggttctgagagga

SEQ ID NO: 10870 - DNA, 301 bp, unidentified
  misc_feature 1..301: note = Ascusbbf_372C, encodes 16S rRNA
  source 1..301: mol_type = genomic DNA
agagtttgatcatggctcaggatgaacgctagcgacaggcttaacacatgcaagtcgaggggcagcgggcgagtggcaacactcgctgtcggcgaccggcgcactggtgagtaacacgtatgcaacctgcccccttctgggagataacccatagaaatgtggcctaatatcccatagtcggtccagccgcatggccgggccgggaaaggcgagccggaaggggatgggcatgcggcgcattagctagttggcggggcagaggcccaccaaggcgacgatgcgtaggggttctgagaggaag

SEQ ID NO: 10871 - DNA, 301 bp, unidentified
  misc_feature 1..301: note = Ascusbbf_372D, encodes 16S rRNA
  source 1..301: mol_type = genomic DNA
agagtttgatcatggctcaggatgaacgctagcgacaggcttaacacatgcaagtcgaggggcagcgggcgagtggcaacacttgctgtcggcgaccggcgcactggtgagtaacacgtatgcaacctgcccccttctgggagataacccatagaaatgtggcctaatatcccatagtcggcccagccgcatggctgggccgggaaaggcgagccggaaggggatgggcatgcggcgcattagctagttggcggggcagaggcccaccaaggcgacgatgcgtaggggttctgagaggaag

SEQ ID NO: 10872 - DNA, 301 bp, unidentified
  misc_feature 1..301: note = Ascusbbf_372E, encodes 16S rRNA
  source 1..301: mol_type = genomic DNA
agagtttgatcctggctcaggatgaacgctagcgacaggcttaacacatgcaagtcgaggggcagcgggcgagtggcaacacttgctgtcggcgaccggcgcactggtgagtaacacgtatgcaacctgcccccttctgggagataacccatagaaatgtggcctaatatcccatagtcggcccagccgcatggccgggccgggaaaggcgagccggaaggggatgggcatgcggcgcattagctagttggcggggcagaggcccaccaaggcgacgatgcgtaggggttctgagaggaag

SEQ ID NO: 10873 - DNA, 301 bp, unidentified
  misc_feature 1..301: note = Ascusbbf_372F, encodes 16S rRNA
  source 1..301: mol_type = genomic DNA
agagtttgatcctggctcaggacgaacgctggcggcgtgcttaacacatgcaagtcgaggggcagcgggcgagtggcaacacttgctgtcggcgaccggcgcactggtgagtaacacgtatgcaacctgcccccttctgggagataacccatagaaatgtggcctaatatcccatagtcggcccagccgcatggccgggccgggaaaggcgagccggaaggggatgggcatgcggcgcattagctagttggcggggcagaggcccaccaaggcgacgatgcgtaggggttctgagaggaag

SEQ ID NO: 10874 - DNA, 300 bp, unidentified
  misc_feature 1..300: note = Ascusbbf_372G, encodes 16S rRNA
  source 1..300: mol_type = genomic DNA
agagtttgatcctggctcaggatgaacgctagcgacaggcttaacacatgcaagtcgaggggcagcgggcgagtggcaacacttgctgtcggcgaccggcgcactggtgagtaacacgtatgcaacctgcccccttctgggagataacccatagaaatgtggcctaatatcccatagtcggcccagccgcatggccgggccgggaaaggcgagccggaaggggatgggcatgcggcgcattagctagttggcggggcagaggcccaccaaggcgacgatgcgtaggggttctgagaggaa

SEQ ID NO: 10875 - DNA, 301 bp, unidentified
  misc_feature 1..301: note = Ascusbbf_667A, encodes 16S rRNA
  source 1..301: mol_type = genomic DNA
agagtttgatcctggctcaggacgaacgctggcggcatgcctaacacatgcaagtcgaacggagattatttcggtaatcttagtggcgaacgggtgagtaacgcgtaggcaacctgccctttagttggggacaacattccgaaaggggtgctaataccgaatgtgatcgcttttccgcatggaagagcgatgaaagatggcctctatttataagctatcgctaaaggatgggcctgcgtctgattagctagttggtggggtaacggcctaccaaggcgacgatcagtagccggtctgagag

SEQ ID NO: 10876 - DNA, 301 bp, unidentified
  misc_feature 1..301: note = Ascusbbf_667B, encodes 16S rRNA
  source 1..301: mol_type = genomic DNA
agagtttgatcatggctcaggacgaacgctggcggcatgcctaacacatgcaagtcgaacggagattatttcggtaatcttagtggcgaacgggtgagtaacgcgtaggcaacctgccctttagttggggacaacattccgaaaggggtgctaataccgaatgtgatcgcttttccgcatggaagagcgatgaaagatggcctctatttataagctatcgctaaaggatgggcctgcgtctgattagctagttggtggggtaacggcctaccaaggcgacgatcagtagccggtctgagag

SEQ ID NO: 10877 - DNA, 301 bp, unidentified
  misc_feature 1..301: note = Ascusbbf_1207A, encodes 16S rRNA
  source 1..301: mol_type = genomic DNA
agagtttgatcatggctcaggatgaacgctagcgacaggcctaacacatgcaagtcgaggggcagcacgaaggaagcttgctttctttggtggcgaccggcgcacgggtgcgtaacaggtgtgcaatctgtccatagtcggggaatagcccagcgaaagttggattaatgctccatgtgaatcgagaccgcatgatcttgatttgaaacgtaaggactatgggtgagcacgcttctgattagatagttggtgaggtaacggctcaccaagtcgacgatcagtaggggttctgagaggaagg

SEQ ID NO: 10878 - DNA, 300 bp, unidentified
  misc_feature 1..300: note = Ascusbbf_1207B, encodes 16S rRNA
  source 1..300: mol_type = genomic DNA
agagtttgatcatggctcaggatgaacgctagcgacaggcctaacacatgcaagtcgaggggcagcgcggaagaagcttgctttttctggcggcgaccggcgcacgggtgcgtaacaggtgtgcaatctgtccatagtcggggaatagcccagcgaaagttggattaatgctccatgtgaatcgagaccgcatgatcttgatttgaaacgtaaggactatgggtgagcacgcttctgattagatagttggtgaggtaacggctcaccaagtcgacgatcagtaggggttctgagaggaag

SEQ ID NO: 10879 - DNA, 300 bp, unidentified
  misc_feature 1..300: note = Ascusbbf_1207C, encodes 16S rRNA
  source 1..300: mol_type = genomic DNA
agagtttgatcatggctcaggatgaacgctagcgacaggcctaacacatgcaagtcgaggggcagcgggattgaagcttgctttaattgccggcgaccggcgcacgggtgcgtaacaggtgtgcaatctgtccatagtcggggaatagcccagcgaaagttggattaatgctccatgtgaatcgagaccgcatgattttgatttgaaacgtaaggactatgggtgagcacgcttctgattagatagttggtgaggtaacggctcaccaagtcgacgatcagtaggggttctgagaggaag

SEQ ID NO: 10880 - DNA, 301 bp, unidentified
  misc_feature 1..301: note = Ascusbbf_1207D, encodes 16S rRNA
  source 1..301: mol_type = genomic DNA
agagtttgatcatggctcaggatgaacgctagcgacaggcctaacacatgcaagtcgaggggcagcgggattgaagcttgctttaattgccggcgaccggcgcacgggtgcgtaacaggtgtgcaatctgtccatagtcgggggatagcccagcgaaagctgaattaacactccatgtgaatcgagaccgcatgatcttgatttgaaacgcaaggactatgggtgagcacgcttctgattagatagttggtgaggtaacggctcaccaagtcgacgatcagtaggggttctgagaggaagg

SEQ ID NO: 10881 - DNA, 301 bp, unidentified
  misc_feature 1..301: note = Ascusbbf_1207E, encodes 16S rRNA
  source 1..301: mol_type = genomic DNA
agagttttatcatggctcaggatgaacgctagctacaggcttaacacatgcaagtcgaggggcagcgggattgaagcttgctttaattgccggcgaccggcgcacgggtgcgtaacaggtgtgcaatctgtccatagtcgggggatagcccagcgaaagctgaattaatgctccatgtgaatcgagaccgcatgattttgatttgaaacgtaaggactatgggtgagcacgcttctgattagatagttggtgaggtaacggctcaccaagtcgacgatcagtaggggttctgagaggaagg

SEQ ID NO: 10882 - DNA, 301 bp, unidentified
  misc_feature 1..301: note = Ascusbbf_1207F, encodes 16S rRNA
  source 1..301: mol_type = genomic DNA
agagtttgatcctggctcaggatgaacgctagcgacaggcctaacacatgcaagtcgaggggcagcgcggaagaagcttgctttttctggcggcgaccggcgcacgggtgcgtaacaggtgtgcaatctgtccatagtcggggaatagcccagcgaaagttggattaatgctccatgtgaatcgagaccgcatgatcttgatttgaaacgtaaggactatgggtgagcacgcttctgattagatagttggtgaggtaacggctcaccaagtcgacgatcagtaggggttctgagaggaagg

SEQ ID NO: 10883 - DNA, 301 bp, unidentified
  misc_feature 1..301: note = Ascusbbf_1207G, encodes 16S rRNA
  source 1..301: mol_type = genomic DNA
agagtttgatcctggctcaggatgaacgctagcgacaggcctaacacatgcaagtcgaggggcagcgggattgaagcttgctttaattgccggcgaccggcgcacgggtgcgtaacaggtgtgcaatctgtccatagtcggggaatagcccagcgaaagttggattaatgctccatgtgaatcgagaccgcatgattttgatttgaaacgtaaggactatgggtgagcacgcttctgattagatagttggtgaggtaacggctcaccaagtcgacgatcagtaggggttctgagaggaagg

SEQ ID NO: 10884 - DNA, 301 bp, unidentified
  misc_feature 1..301: note = Ascusbbf_1207H, encodes 16S rRNA
  source 1..301: mol_type = genomic DNA
agagtttgatcatggctcaggatgaacgctagcgacaggcctaacacatgcaagtcgaggggcagcgggattgaagcttgctttaattgccggcgaccggcgcacgggtgcgtaacaggtgtgcaatctgtccatagtcggggaatagcccagcgaaagttggattaatgctccatgtgaatcgagaccgcatgatcttgatttgaaacgtaaggactatgggtgagcacgcttctgattagatagttggtgaggtaacggctcaccaagtcgacgatcagtaggggttctgagaggaagg

SEQ ID NO: 10885 - DNA, 301 bp, unidentified
  misc_feature 1..301: note = Ascusbbf_1207I, encodes 16S rRNA
  source 1..301: mol_type = genomic DNA
agagtttgatcatggctcaggatgaacgctagcgacaggcctaacacatgcaagtcgaggggcagcgggattgaagcttgctttaattgccggcgaccggcgcacgggtgcgtaacaggtgtgcaatctgtccatagtcggggaatagcccagcgaaagttggattaatgctccatgtgaatcgagaccgcatgattttgatttgaaacgtaaggactatgggtgagcacgcttctgattagatagttggtgaggtaacggctcaccaagtcgacgatcagtaggggttctgagaggaagg

SEQ ID NO: 10886 - DNA, 301 bp, unidentified
  misc_feature 1..301: note = Ascusbbf_1207J, encodes 16S rRNA
  source 1..301: mol_type = genomic DNA
agagtttgatcctggctcaggatgaacgctagcgacaggcctaacacatgcaagtcgaggggcagcgggattgaagcttgctttaattgccggcgaccggcgcacgggtgcgtaacaggtgtgcaatctgtccatagtcggggaatagcccagcgaaagttggattaatgctccatgtgaatcgagaccgcatgattttgatttgaaacgtaaggactatgggtgagcacgcttctgattagatagttggtggggtaacggctcaccaagtcgacgatcagtaggggttctgagaggaagg

SEQ ID NO: 10887 - DNA, 301 bp, unidentified
  misc_feature 1..301: note = Ascusbbf_3875A, encodes 16S rRNA
  source 1..301: mol_type = genomic DNA
agagtttgatcctggctcaggatgaacgctggcggcgtgcctaatacatgcaagtcgaacggagtgtgccattgatgaggcttcggcggattcgccggtacacttagtggcggacgggtgagtaacgcgtggataacctgcctcacacagggggatagcagctggaaacggctgataataccgcataagcgcacagtgacgcatgtcacagtgtgaaaaactccggtggtgtgagatggatccgcgtctgattagcttgttggcggggtaacggcccaccaaggcgacgatcagtagccgg

SEQ ID NO: 10888 - DNA, 301 bp, unidentified
  misc_feature 1..301: note = Ascusbbf_3875B, encodes 16S rRNA
  source 1..301: mol_type = genomic DNA
agagtttgatcatggctcaggatgaacgctggcggcgtgcctaatacatgcaagtcgaacggagtgtgccattgatgaggcttcggcggattcgccggtacacttagtggcggacgggtgagtaacgcgtggataacctgcctcacacagggggatagcagctggaaacggctgataataccgcataagcgcacggtgacgcatgtcacagtgtgaaaaactccggtggtgtgagatggatccgcgtctgattagcttgttggcggggtaacggcccaccaaggcgacgatcagtagccgg

SEQ ID NO: 10889 - DNA, 301 bp, unidentified
  misc_feature 1..301: note = Ascusbbf_3875C, encodes 16S rRNA
  source 1..301: mol_type = genomic DNA
agagtttgatcctggctcaggatgaacgctggcggcgtgcctaatacatgcaagtcgaacggagtgtgccattgatgaagcttcggcggattcgccggtacacttagtggcggacgggtgagtaacgcgtggataacctgcctcacacagggggatagcagctggaaacggctgataataccgcataagcgcacagtgacgcatgtcacagtgtgaaaaactccggtggtgtgagatggatccgcgtctgattagcttgttggcggggtaacggcccaccaaggcgacgatcagtagccgg

SEQ ID NO: 10890 - DNA, 301 bp, unidentified
  misc_feature 1..301: note = Ascusbbf_3875D, encodes 16S rRNA
  source 1..301: mol_type = genomic DNA
agagtttgatcatggctcaggatgaacgctggcggcgtgcctaatacatgcaagtcgaacggagtgtgccattgatgaagcttcggcagattcgccggtacacttagtggcggacgggtgagtaacgcgtggataacctgcctcacacagggggatagcagctggaaacggctgataataccgcataagcgcacagtgacgcatgtcacagtgtgaaaaactccggtggtgtgagatggatccgcgtctgattagcttgttggcggggtaacggcccaccaaggcgacgatcagtagccgg

SEQ ID NO: 10891 - DNA, 300 bp, unidentified
  misc_feature 1..300: note = Ascusbbf_72889A, encodes 16S rRNA
  source 1..300: mol_type = genomic DNA
agagtttgatcatggctcaggatgaacgctggcggcgtgcctaacacatgcaagtcgagcggaccttagagagtgaacagcttgctgggatctttcgaaaggttagcggcggacgggtgagtaacgcgtgggtaacctgcctcatacagggggatagcagttggaaacgactggtaataccgcataagcgcacagtgccgcatggtacggtgtgaaaaactccggtggtatgagatggacccgcgtccgattagccagttggcggggtaacggcccaccaaagcgacgatcggtagccgg

SEQ ID NO: 10892 - DNA, 300 bp, unidentified
  misc_feature 1..300: note = Ascusbbf_72889B, encodes 16S rRNA
  source 1..300: mol_type = genomic DNA
agagtttgatcctggctcaggatgaacgctggcggcgtgcctaacacatgcaagtcgagcggaccttagagagtgaacagcttgctgggatcttttgaaaggttagcggcggacgggtgagtaacgcgtgggtaacctgcctcatacagggggatagcagttggaaacgactggtaataccgcataagcgcacagtaccgcatggtacggtgtgaaaaactccggtggtatgagatggacccgcgtccgattagccagttggcggggtaacggcccaccaaagcgacgatcggtagccgg

SEQ ID NO: 10893 - DNA, 301 bp, unidentified
  misc_feature 1..301: note = Ascusbbf_106863A, encodes 16S rRNA
  source 1..301: mol_type = genomic DNA
agagtttgatcctggctcaggatgaacgctagcgacaggcttaacacatgcaagtcgaggggcagcgcgagggtagcaatacctttggcggcgaccggcgcactggtgagtaacacgtatgcgacctgccccggacagggggataaacccgggaaactgggcctaataccccatacgcctattggccgcatggtccttaggtgaaagatccgtcggtccgggatgggcatgcggcgcattagcttgttggcggggcaacggcccaccaaggcgacgatgcgtaggggttctgagaggaagg

SEQ ID NO: 10894 - DNA, 301 bp, unidentified
  misc_feature 1..301: note = Ascusbbf_106863B, encodes 16S rRNA
  source 1..301: mol_type = genomic DNA
agagtttgatcctggctcaggatgaacgctagcgacaggcttaacacatgcaagtcgaggggcagcgcgggggtagcaatacctttggcggcgaccggcgcactggtgagtaacacgtatgcgacctgccccggacagggggataaacccgggaaactgggcctaataccccataggccttccgaccgcatggtcggtaggtgaaagatccgtcggtccgggatgggcatgcggcgcattagcttgttggcggggcaacggcccaccaaggcgacgatgcgtaggggttctgagaggaagg

SEQ ID NO: 10895 - DNA, 300 bp, unidentified
  misc_feature 1..300: note = Ascusbbf_120B, encodes 16S rRNA
  source 1..300: mol_type = genomic DNA
agagtttgatcctggctcaggatgaacgctagctacaggcttaacacatgcaagtcgaggggcagcatattggtagcttgctactaatgatggcgaccggcgcacgggtgagtaacgcgtatccaaccttccctatactagaggatagcccggcgaaagtcggattaatactctatgttcttcgtagatgacatctgaaatgaagcaaagatttatcggtataggatggggatgcgtctgattaggttgttggcggggtaacggcccaccaagcccgcgatcagtaggggttctgagagg

SEQ ID NO: 10896 - DNA, 300 bp, unidentified
  misc_feature 1..300: note = Ascusbbf_120C, encodes 16S rRNA
  source 1..300: mol_type = genomic DNA
agagtttgatcctggctcaggatgaacgctagctacaggcttaacacatgcaagtcgaggggcagcatattggtagcttgctactaatgatggcgaccggcgcacgggtgagtaacgcgtatccaaccttccctatactagaggatagcccggcgaaagtcggattaatactctatgttcttcgtagatgacatctgaaatgaagcaaagatttatcggtataggatggggatgcgtctgattaggttgttggcggggtaacggcccaccaagcctgcgatcagtaggggttctgagagg

SEQ ID NO: 10897 - DNA, 301 bp, unidentified
  misc_feature 1..301: note = Ascusbbf_1207K, encodes 16S rRNA
  source 1..301: mol_type = genomic DNA
agagtttgatcatggctcaggatgaacgctagcgacaggcctaacacatgcaagtcgaggggcagcgggattgaagcttgctttaattgccggcgaccggcgcacgggtgcgtaacaggtgtgcaatctgtccatagtcggggaatagcccagcgaaagttggattaatgctccatgtgaatcgaagccgcatgactttgatttgaaacgtaaggactatgggtgagcacgcttctgattagatagttggtgaggtaacggctcaccaagtcgacgatcagtaggggttctgagaggaagg

SEQ ID NO: 10898 - DNA, 301 bp, unidentified
  misc_feature 1..301: note = Ascusbbf_1207L, encodes 16S rRNA
  source 1..301: mol_type = genomic DNA
agagtttgatcctggctcaggatgaacgctagcgacaggcctaacacatgcaagtcgaggggcagcgggattgaagcttgctttaattgccggcgaccggcgcacgggtgcgtaacaggtgtgcaatctgtccatagtcggggaatagcccagcgaaagttggattaatgctccatgtgaatcgaagccgcatgactttgatttgaaacgtaaggactatgggtgagcacgcttctgattagatagttggtgaggtaacggctcaccaagtcgacgatcagtaggggttctgagaggaagg

SEQ ID NO: 10899 - DNA, 300 bp, unidentified
  misc_feature 1..300: note = Ascusbbf_930A, encodes 16S rRNA
  source 1..300: mol_type = genomic DNA
agagtttgatcctggctcaggatgaacgctagctacaggcttaacacatgcaagtcgaggggcagcatgatcttagcttgctaagattgatggcgaccggcgcacgggtgagtaacgcgtatccaaccttccctgtactaggggatagcccggcgaaagtcggattaataccctatgttttccgaagcgagcatttaatttggaacaaaggtttaccggtataggatggggatgcgtctgattagatagtaggcggggtaacggcccacctagtcgacgatcagtaggggttctgagagg

SEQ ID NO: 10900 - DNA, 300 bp, unidentified
  misc_feature 1..300: note = Ascusbbf_915A, encodes 16S rRNA
  source 1..300: mol_type = genomic DNA
agagtttgatcctggctcaggatgaacgctagctacaggcttaacacatgcaagtcgaggggcagcatgaagtcagcttgctgactttgatggcgaccggcgcacgggtgcgtaacacgtatccaatctacccatggctcagggatagcctttcgaaagaaagattaatacctgatggtcttacatggagacatctcctagtaagtaaagattaatcggcgatggatgaggatgcgtctgattagatagtaggcggggtaacggcccacctagtcgacgatcagtaggggttctgagagg

SEQ ID NO: 10901 - DNA, 300 bp, unidentified
  misc_feature 1..300: note = Ascusbbf_8941A, encodes 16S rRNA
  source 1..300: mol_type = genomic DNA
agagtttgatcatggctcaggatgaacgctagctacaggcttaacacatgcaagtcgaggggcagcatgggggttgcttgcaactcccgatggcgaccggcgcacgggtgagtaacgcgtatccaaccttccccatagtaggggatagcccgtagaaatgcggattaataccctatgttctccgaagaggacatctgatttggagtaaagatttatcgctatgggatggggatgcgtctgattaggctgcaggcggggtaacggcccacctggcctacgatcagtaggggttctgagagg

SEQ ID NO: 10902 - DNA, 301 bp, unidentified; identical to SEQ ID NO: 10860
  misc_feature 1..301: note = Ascusbbf_8480B, encodes 16S rRNA
  source 1..301: mol_type = genomic DNA

SEQ ID NO: 10903 - DNA, 300 bp, unidentified
  misc_feature 1..300: note = Ascusbbf_374B, encodes 16S rRNA
  source 1..300: mol_type = genomic DNA
agagtttgatcctggctcaggatgaacgctagctacaggcttaacacatgcaagtcgaggggcagcatagcggaagcttgcttctgctgatggcgaccggcgcacgggtgagtaacgcgtatccaaccttccctacagtaggggatagcccggcgaaagtcggattaataccctatgttcttcttcgatgacatctgacgagaagcaaaggttcaccgctataggatggggatgcgtctgattagcttgttggcggggtaacggcccaccaaggctacgatcagtaggggttctgagagg

SEQ ID NO: 10904 - DNA, 300 bp, unidentified
  misc_feature 1..300: note = Ascusbbf_6906A, encodes 16S rRNA
  source 1..300: mol_type = genomic DNA
agagtttgatcatggctcaggatgaacgctagctacaggcttaacacatgcaagtcgaggggcagcgaagagttagcttgctaattctgtcggcgaccggcgcacgggtgagtaacgcgtatccaaccttccccttagtagggcatagcccggcgaaagtcggattaataccctatgttgttcatcgcaggcatctaaagtgaaccaaagatttattgctaagggatggggatgcgtctgattaggttgttggcggggtaacggcccaccaagccttcgatcagtaggggttctgagagg

SEQ ID NO: 10905 - DNA, 300 bp, unidentified
  misc_feature 1..300: note = Ascusbbf_6906B, encodes 16S rRNA
  source 1..300: mol_type = genomic DNA
agagttgatcctggctcgggatgaacgctagctacaggcttaacacatgcaagtcgaggggcagcgaagagttagcttgctaattctgtcggcgaccggcgcacgggtgagtaacgcgtatccaaccttccccttagtagggcatagcccggcgaaagtcggattaataccctatgttgttcatcgcaggcatctaaagtgaaccaaagatttattgctaagggatggggatgcgtctgattaggttgttggcggggtaacggcccaccaagccatcgatcagtaggggttctgagagga

SEQ ID NO: 10906 - DNA, 301 bp, unidentified
  misc_feature 1..301: note = Ascusbbf_6906D, encodes 16S rRNA
  source 1..301: mol_type = genomic DNA
agagtttgatcctggctcaggatgaacgctagctacaggcttaacacatgcaagtcgaggggcagcgaagagttagcttgctaattctgtcggcgaccggcgcacgggtgagtaacgcgtatccaaccttccccttagtagggcatagcccggcgaaagtcggattaataccctatgttgttcatcgcaggcatctaaagtgaaccaaagatttattgctaagggatggggatgcgtctgattaggttgttggcggggtaacggcccaccaagccctcgatcagtaggggtcctgagagga

SEQ ID NO: 10907 - DNA, 300 bp, unidentified
  misc_feature 1..300: note = Ascusbbf_6906E, encodes 16S rRNA
  source 1..300: mol_type = genomic DNA
agagtttgatcctggctcaggatgaacgctagctacaggcttaacacatgcaagtcgaggggcagcgaagagttagcttgctaattctgtcggcgaccggcgcacgggtgagtaacgcgtatccaaccttccccttagtagggcatagcccggcgaaagtcggattaataccctatgttgttcatcgcaggcatctaaagtgaaccaaagatttattgctaagggatggggatgcgtctgattaggttgttggcggggtaacggcccaccaagccctcgatcagtaggggttctgagagg

SEQ ID NO: 10908 - DNA, 300 bp, unidentified
  misc_feature 1..300: note = Ascusbbf_69K, encodes 16S rRNA
  source 1..300: mol_type = genomic DNA
agagtttgatcctggctcaggatgaacgctagctacaggcttaacacatgcaagtcgaggggcagcatgatcgaagcttgctttgattgatggcgaccggcgcacgggtgagtaacgcgtatccaaccttccctatagtagagaatagcccggcgaaagtcggattaatgctctatgttgtatttagaggacatctgaagaataccaaaggtttaccgctataggatggggatgcgtctgattaggtagtaggcggggtaacggcccacctagccgacgatcagtaggggttctgagagg

SEQ ID NO: 10909 - DNA, 300 bp, unidentified
  misc_feature 1..300: note = Ascusbbf_69M, encodes 16S rRNA
  source 1..300: mol_type = genomic DNA
agagtttgatcctggctcaggatgaacgctagctacaggcttaacacatgcaagtcgaggggcagcataacgaaagcttgcttttgttgatggcgaccggcgcacgggtgagtaacgcgtatccaaccttccctatagtagagaatagcccggcgaaagtcggattaatgctctatgttgtatttagaggacatctgaagaataccaaaggtttaccgctataggatggggatgcgtctgattaggtagtaggcggggtaacggcccacctagccgacgatcagtaggggttctgagagg

SEQ ID NO: 10910 - DNA, 300 bp, unidentified; identical to SEQ ID NO: 10757
  misc_feature 1..300: note = Ascusbbf_69N, encodes 16S rRNA
  source 1..300: mol_type = genomic DNA

SEQ ID NO: 10911 - DNA, 300 bp, unidentified; identical to SEQ ID NO: 10758
  misc_feature 1..300: note = Ascusbbf_69O, encodes 16S rRNA
  source 1..300: mol_type = genomic DNA

SEQ ID NO: 10912 - DNA, 300 bp, unidentified
  misc_feature 1..300: note = Ascusbbf_69P, encodes 16S rRNA
  source 1..300: mol_type = genomic DNA
agagtttgatcctggctcaggatgaacgctagctacaggcttaacacatgcaagtcgaggggcagcataacgaaagcttgcttttgttgatggcgaccggcgcacgggtgagtaacgcgtatccaaccttccctatagtagagaatagcccggcgaaagtcggattaatgctctatgttgtatttagaggacatctgaagaataccaaaggtttaccgctataggatggggatgcgtctgattaggttgttggcggggtaacggcccaccaagcctacgatcagtaggggttctgagagg

SEQ ID NO: 10913 - DNA, 300 bp, unidentified
  misc_feature 1..300: note = Ascusbbf_721A, encodes 16S rRNA
  source 1..300: mol_type = genomic DNA
agagtttgatcctggctcaggatgaacgctagctacaggcttaacacatgcaagtcgaggggcagcatgattctagcttgctagaattgatggcgaccggcgcacgggtgagtaacgcgtatccaaccttccctatagtagaggatagcccggcgaaagtcggattaatactctatgttgttcaatgcggacatctaagttgaaccaaaggtttaccgctataggatggggatgcgtctgattagatggtaggcggggtaacggcccacctagtcgacgatcagtaggggttctgagagg

SEQ ID NO: 10914 - DNA, 300 bp, unidentified
  misc_feature 1..300: note = Ascusbbf_721B, encodes 16S rRNA
  source 1..300: mol_type = genomic DNA
agagtttgatcctggctcaggatgaacgctagctacaggcttaacacatgcaagtcgaggggcagcatgattctagcttgctagaattgatggcgaccggcgcacgggtgagtaacgcgtatccaaccttccctatagtagaggatagcccggcgaaagtcggattaatactctatgttttccaatgaggacatctgagctggaataaaggtttaccgctataggatggggatgcgtctgattagatggtaggcggggtaacggcccacctagtcgacgatcagtaggggttctgagagg

SEQ ID NO: 10915 - DNA, 300 bp, unidentified
  misc_feature 1..300: note = Ascusbbf_721C, encodes 16S rRNA
  source 1..300: mol_type = genomic DNA
agagtttgatcatggctcaggatgaacgctagctacaggcttaacacatgcaagtcgaggggcagcatgattctagcttgctagaattgatggcgaccggcgcacgggtgagtaacgcgtatccaaccttccctatagtagaggatagcccggcgaaagtcggattaatactctatgttgttcaatgcggacatctaagttgaaccaaaggtttaccgctataggatggggatgcgtctgattagatggtaggcggggtaacggcccacctagtcgacgatcagtaggggttctgagagg

SEQ ID NO: 10916 - DNA, 301 bp, unidentified
  misc_feature 1..301: note = Ascusbbf_3819A, encodes 16S rRNA
  source 1..301: mol_type = genomic DNA
agagtttgatcatggctcaggatgaacgctggcggcgtgcttaacacatgcaagtcgagcgaagctctcttgttgatttcttcggattgaaacaagagatgactgagcggcggacgggtgagtaacgcgtggagaacctgccccgtaccgggggataacagttagaaatgactgctaataccgcataagcgcacactatcgcatgatagagtgtgaaaaactccggtggtacgggatggctccgcgttggattagccagttggcggggtaacggcccaccaaagcgacgatccatagccgg

SEQ ID NO: 10917 - DNA, 301 bp, unidentified
  misc_feature 1..301: note = Ascusbbf_4323A, encodes 16S rRNA
  source 1..301: mol_type = genomic DNA
agagtttgatcctggctcaggatgaacgctagctacaggcttaacacatgcaagtcgaggggcagcatgaaggtagcaatacctttgatggcgaccggcgcacgggtgcgtaacacgtatccaatctacccatggctcgggaatagcctttcgaaagaaagattaatgcccgatggtctgtgattgagacatctcgattacagtaaagatttatcggcgatggatgaggatgcgtccgattaggtagtaggcggggtaacggcccacctagccgacgatcggtaggggttctgagaggaag

SEQ ID NO: 10918 - DNA, 301 bp, unidentified; identical to SEQ ID NO: 10573
  misc_feature 1..301: note = Ascusbbf_4323B, encodes 16S rRNA
  source 1..301: mol_type = genomic DNA

SEQ ID NO: 10919 - DNA, 301 bp, unidentified
  misc_feature 1..301: note = Ascusbbf_4323C, encodes 16S rRNA
  source 1..301: mol_type = genomic DNA
agagtttgatcatggctcaggatgaacgctagctacaggcttaacacatgcaagtcgaggggcagcatgagggtagcaatacctttgatggcgaccggcgcacgggtgcgtaacacgtatccaatctacccatggctctgggatagcctttcgaaagaaagattaataccggatggtctgtgtttgagacatctcgaatgcagtaaagatttatcggcgatggatgaggatgcgtccgattaggtagtaggcggggtaacggcccacctagcctacgatcggtaggggttctgagaggaag

SEQ ID NO: 10920 - DNA, 301 bp, unidentified; identical to SEQ ID NO: 10575
  misc_feature 1..301: note = Ascusbbf_4323D, encodes 16S rRNA
  source 1..301: mol_type = genomic DNA

SEQ ID NO: 10921 - DNA, 300 bp, unidentified
  misc_feature 1..300: note = Ascusbbf_6087A, encodes 16S rRNA
  source 1..300: mol_type = genomic DNA
agagtttgatcatggctcaggatgaacgctagctacaggcttaacacatgcaagtcgaggggcagcaggattctagcttgctagaattgctggcgaccggcgcacgggtgagtaacgcgtatccaacctggcccttagtagaggatagcccggcgaaagtcggattaatactctatgttctccaatgcgggcatctaatttggagcaaagatttatcgctatgggatggggatgcgtctgattagcttgtcggcggggtaacggcccaccgaggcaacgatcagtaggggttctgagagg

SEQ ID NO: 10922 - DNA, 300 bp, unidentified; identical to SEQ ID NO: 10538
  misc_feature 1..300: note = Ascusbbf_6087B, encodes 16S rRNA
  source 1..300: mol_type = genomic DNA

SEQ ID NO: 10923 - DNA, 300 bp, unidentified
  misc_feature 1..300: note = Ascusbbf_6087C, encodes 16S rRNA
  source 1..300: mol_type = genomic DNA
agagtttgatcctggctcaggatgaacgctagctacaggcttaacacatgcaagtcgaggggcatcaggattctagcttgctaggattgctggcgaccggcgcacgggtgagtaacgcgtatccaacctggcccttagtagaggatagcccggcgaaagtcggattaatactctatgttctccaatgcgggcatctaatttggagcaaagatttatcgctatgggatggggatgcgtctgattagcttgtcggcggggtaacggcccaccgaggcaacgatcagtagggggtctgagagg

SEQ ID NO: 10924 - DNA, 300 bp, unidentified
  misc_feature 1..300: note = Ascusbbf_8414A, encodes 16S rRNA
  source 1..300: mol_type = genomic DNA
agagtttgatcatggctcaggacgaacgctggcggcgtgcttaacacatgcaagtcgtgcgaggatgtgattggaaggtcttcggaccggaagattgcatccgagcggcggacgggtgagtaacgcgtgagcaacctgccttcaacagggggataacgcatcgaaagatgtgctaataccgcgtaagaccacggcatcacatggtgcaggggtcaaaggagcaatccggttgaagatgggctcgcgtccgattagccagttggtgaggtaacggcccaccaaagcaacgatcggtagccg

SEQ ID NO: 10925 - DNA, 227 bp, unidentified
  misc_feature 1..227: note = Ascusbbf_1372985G, encodes 16S rRNA
  source 1..227: mol_type = genomic DNA
agagtttgatcatggctcagattgaacgctggcggcaggcctaacacatgcaagtcgaggggcatcgcggggtagcaataccctggcggcgaccggcgaaagggtgcgtaacgcgtgagcgacatgcccgtcacagggggataaccggcggaaacgccgcctaataccccatatgaggccaggccacatggccgggccttgaaagtcaaggcggtgacggattggct

SEQ ID NO: 10926 - DNA, 225 bp, unidentified
  misc_feature 1..225: note = Ascusbbf_1372985H, encodes 16S rRNA
  source 1..225: mol_type = genomic DNA
agagtttgatcctggctcaggatgaacgctagcggcaggcttaacacatgcaagtcgaggggcatcgcggggtagcaataccctggcggcgaccggcgaaagggtgcgtaacgcgtgagcgacatgcccgtcacagggggataaccggcggaaacgccgcctaataccccatatgaggccaggccacatggctgggtcttgaaagtcaaggcggtgacggattgg

SEQ ID NO: 10927 - DNA, 214 bp, unidentified
  misc_feature 1..214: note = Ascusbbf_1372985J, encodes 16S rRNA
  source 1..214: mol_type = genomic DNA
agagtttgatcatggctcaggatgaacgctagcggcaggcttaacacatgcaagtcgaggggcatcgcggggtagcaataccctggcggcgaccggcgaaagggtgcgtaacgcgtgagcgacatgcccgtcacagggggataaccggcggaaacgccgcctaataccccatatgaggccaggccacatggccgggccttgaaagtcaaggcgg

SEQ ID NO: 10928 - DNA, 214 bp, unidentified; identical to SEQ ID NO: 4743
  misc_feature 1..214: note = Ascusbbf_1372985K, encodes 16S rRNA
  source 1..214: mol_type = genomic DNA

SEQ ID NO: 10929 - DNA, 217 bp, unidentified
  misc_feature 1..217: note = Ascusbbf_92G, encodes 16S rRNA
  source 1..217: mol_type = genomic DNA
agagtttgatcatggctcaggatgaacgctggcggcgcgcctaacacatgcaagtcgaacggccggacccaccccggtgggcgaggcagtggcgaacggctgagtaacacgtgggcaacctgcccccctccccgggacagcctcgggaaaccgtgggtaataccggatagaccgccccctccgcatgggaggggcgggaaagctccggcgggggggg

SEQ ID NO: 10930 - DNA, 217 bp, unidentified
  misc_feature 1..217: note = Ascusbbf_92I, encodes 16S rRNA
  source 1..217: mol_type = genomic DNA
agagtttgatcctggctcaggatgaacgctggcggcgcgcctaacacatgcaagtcgaacggccggacccacctcggtgggcgaggcagtggcgaacggctgagtaacacgtgggcaacctgcccccctccccgggacagcctcgggaaaccgtgggtaataccggatatgccgccccctccgcatgggaggggcgggaaagctccggcgggggggg

SEQ ID NO: 10931 - DNA, 217 bp, unidentified
  misc_feature 1..217: note = Ascusbbf_92J, encodes 16S rRNA
  source 1..217: mol_type = genomic DNA
agagtttgatcatggctcaggatgaacgctggcggcgcgcctaacacatgcaagtcgaacggccggacccacctcggtgggcgaggcagtggcgaacggctgagtaacacgtgggcaacctgcccccctccccgggacagcctcgggaaaccgtgggtaataccggatactccgccccctccgcatgggaggggcgggaaagctccggcgggggggg

SEQ ID NO: 10932 - DNA, 300 bp, unidentified
  misc_feature 1..300: note = Ascusbbf_120A, encodes 16S rRNA
  source 1..300: mol_type = genomic DNA
agagtttgatcctggctcaggatgaacgctagctacaggcttaacacatgcaagtcgaggggcagcatgatcgaagcttgctttgattgatggcgaccggcgcacgggtgagtaacgcgtatccaaccttccctatactagaggatagcccggcgaaagtcggattaatactctatgttcttcgtagatgacatctgaaatgaagcaaagatttatcggtataggatggggatgcgtctgattaggttgttggcggggtaacggcccaccaagcccgcgatcagtaggggttctgagagg

SEQ ID NO: 10933 - DNA, 300 bp, unidentified; identical to SEQ ID NO: 10388
  misc_feature 1..300: note = Ascusbbf_930B, encodes 16S rRNA
  source 1..300: mol_type = genomic DNA

SEQ ID NO: 10934 - DNA, 301 bp, unidentified
  misc_feature 1..301: note = Ascusbbf_8480A, encodes 16S rRNA
  source 1..301: mol_type = genomic DNA
agagtttgatcatggctcaggacgaacgctggcggcgtgcttaacacatgcaagtcgaacggagtgaaggggagcttgctccttggaacttagtggcaaacgggtgagtaacgcgtaggcaacctgcccttcagatggggacaacatttcgaaaggaatgctaataccgaatgacgtgcattggtcgcatgaccgatgtaccaaaggccgggcaaccggtcactgaaggatgggcctgcgtctgattagctagttggtggggtaacggcccaccaaggcgacgatcagtagccggtctgag

SEQ ID NO: 10935 - DNA, 300 bp, unidentified
  misc_feature 1..300: note = Ascusbbf_374A, encodes 16S rRNA
  source 1..300: mol_type = genomic DNA
agagtttgatcatggctcaggatgaacgctagctacaggcttaacacatgcaagtcgaggggcagcatagcggaagcttgcttctgctgatggcgaccggcgcacgggtgagtaacgcgtatccaaccttccctacagtaggggatagcccggcgaaagtcggattaataccctatgttcttcttcgatgacatctgacgagaagcaaaggttcaccgctataggatggggatgcgtctgattagcttgttggcggggtaacggcccaccaaggcgacgatcagtaggggttctgagagg

SEQ ID NO: 10936 - DNA, 300 bp, unidentified
  misc_feature 1..300: note = Ascusbbf_374C, encodes 16S rRNA
  source 1..300: mol_type = genomic DNA
agagtttgatcatggctcaggatgaacgctagctacaggcttaacacatgcaagtcgaggggcagcatagcggaagcttgcttctgctgatggcgaccggcgcacgggtgagtaacgcgtatccaaccttccctacagtaggggatagcccggcgaaagtcggattaataccctatgttcttcttcgatgacatctgacgagaagcaaaggttcaccgctataggatggggatgcgtctgattagcttgttggcggggtaacggcccaccaaggctacgatcagtaggggttctgagagg

SEQ ID NO: 10937 - DNA, 300 bp, unidentified
  misc_feature 1..300: note = Ascusbbf_6906C, encodes 16S rRNA
  source 1..300: mol_type = genomic DNA
agagtttgatcctggctcaggatgaacgctagctacaggcttaacacatgcaagtcgaggggcagcgaagagttagcttgctaattctgtcggcgaccggcgcacgggtgagtaacgcgtatccaaccttccccttagtagggcatagcccggcgaaagtcggattaataccctatgttgttcatcgcaggcatctaaagtgaaccaaagatttattgctaagggatggggatgcgtctgattaggttgttggcggggtaacggcccaccaagccttcgatcagtaggggttctgagagg

SEQ ID NO: 10938 - DNA, 527 bp, unidentified
  misc_feature 1..527: note = Ascusbbf_69L, encodes 16S rRNA
  source 1..527: mol_type = genomic DNA
agagtttgatcatggctcaggatgaacgctagctacaggcttaacacatgcaagtcgaggggcagcagatcgaaagcttgcttttgatgctggcgaccggcgcacgggtgagtaacgcgtatccaaccttccctatagtagagaatagcccggcgaaagtcgaattaatgctctatgttgtatttagaagacatctgaagaataccaaaggtttaccgctataggatggggatgcgtctgattaggtagtaggcggggtaacggcccacctagccgacgatcagtaggggttctgagaggaaggtcccccacattggaactgagacacggtccaaactcctacgggaggcagcagtgaggaatattggtcaatggacggaagtctgaaccagccaagtagcgtgcaggatgacggccctatgggttgtaaactgcttttatatagggataaagtcggggacgtgtccccgtttgtaggtactatatgaataaggaccggctaattccgtgccagcagccgcggtaat

SEQ ID NO: 10939 - DNA, 1525 bp, unidentified
  misc_feature 1..1525: note = Chordicoccus furentiruminis
  source 1..1525: mol_type = genomic DNA
aatccttaagagagttcgatcctggctcaggatgaacgctggcggcgtgcctaacacatgcaagtcgagcggagtgaagagagcttgcttttttcactcagcggcggatgggtgaggaacgcgtggggaacctgcctctcacagggggataacagctggaaacggctgttaataccgcatatgcacacagtgccgcatggcacagggtggaaagaaattcggtgagagatggacccgcgttggattagcttgttggcggggtaacggcccaccaaggcgatgatccatagccggcctgagagggcgaccggccacattgggactgagacacggcccaaactcctacgggaggcagcagtgggggatattgcacaatggaggaaactctgatgcagcgacgccgcgtgaaggaagacgtgcttcggcatgtaaacttctatcagcagggaagaagatgacggtacctgactaagaagccccggctaactacgtgccagcagccgcggtaatacgtagggggcaagcgttatccggatttactgggtgtaaagggagcgtagacggtgatgcaagtctgatgtgaaaccccggggcttaactccgggcttgcattggaaactgtaccacttgagtactggaggggcaggcggaattcctggtgtagcggtgaaatgcgtagatatcaggaagaacaccggtggcgaaggcggcctgctggacagtaactgacgttgaggctcgaaagcgtggggagcaaacaggattagataccctggtagtccacgccctaaacgatgaataccaggtgtcggcagctgagagctgtcggtgccgcagcaaacgcagtaagtattccacctggggagtacgttcgcaagaatgaaactcaaaggaattgacggggacccgcacaagcggtggagcatgtggtttaattcgaagcaacgcgaagaaccttaccaaatcttgacatcccggtgacagattcagaaatgagtcctttcttcggaacaccggagacaggtggtgcatggttgtcgtcagctcgtgtcgtgagatgttgggtcaagtcccgcaacgagcgcaacccttgtcctcagtagccagcaggtaaagccgggcactctgaggagaccgccagggacaacctggaggaagatggggatgacgtcaaatcatcatgccccttatgatttgggctacacacgtgctacaatggtgtcggacaaagggaagcaaacccgcgagggggagcgaatcccacaaacggcatcccagttcggactgcactctgcaacccgggtgcacgaagctggaatcgctagtaatcgcagatcagcatgctgcggtgaatacgttcccgggtcttgtacacaccgcccgtcacaccatgggagtccgcaacacccgaaatcagtggcccaacccgcaggggagggagctgctgaaggtggggcgaatgactggggtgaagtcgtaacaaggtagccgtatcggaaggtgcggctggatcacctcctttcta

SEQ ID NO: 10940 - DNA, 225 bp, unidentified
  misc_feature 1..225: note = Chordicoccus furentiruminis
  source 1..225: mol_type = genomic DNA
agagttcgatcctggctcaggatgaacgctggcggcgtgcctaacacatgcaagtcgagcggagtgaagagagcttgcttttttcactcagcggcggatgggtgaggaacgcgtggggaacctgcctctcacagggggataacagctggaaacggctgttaataccgcatatgcacacagtgccgcatggcacagggtggaaagaaattcggtgagagatggacc
